(19) United States
(12) Patent Application Publication
(10) Pub. No.: US 2025/0129362 A1
(43) Pub. Date: Apr. 24, 2025

(54) PREPARATION OF LIBRARIES OF PROTEIN VARIANTS EXPRESSED IN EUKARYOTIC CELLS

(71) Applicant: Iontas Limited, London (GB)

(72) Inventors: Kothai Nachiar Devi PARTHIBAN, Cambridge (GB); John MCCAFFERTY, Cambridge (GB)

(21) Appl. No.: 18/683,728

(22) PCT Filed: Aug. 24, 2022
(86) PCT No.: PCT/EP2022/073549

§ 371 Date: Feb. 14, 2024

(30) Foreign Application Priority Data
Aug. 25, 2021 (EP) 21193102.7

(51) Int. Cl. C12N 15/10

(52) U.S. Cl. CPC C12N 15/1082

(57) ABSTRACT

Described herein is a method for identifying a locus in a genome of a eukaryotic cell, said locus being a candidate for insertion of binder sequences. Described herein as well is a method of producing a library of eukaryotic cell clones containing DNA encoding a diverse repertoire of binders.

### FIELD

[0001] The current invention relates to the production of libraries of eukaryotic cell clones, specifically to libraries of eukaryotic cell clones containing DNA encoding a diverse repertoire of binders. Furthermore, the invention relates to methods identifying a locus in a genome of a eukaryotic cell.

### BACKGROUND

[0002] WO2015/166272 describes a method of producing a library of eukaryotic cell clones containing DNA encoding a diverse repertoire of binders. In this method, a site-specific nuclease is used to cleave a recognition sequence in cellular DNA, creating an integration site at which donor DNA encoding the binders can be integrated.

[0003] However, the method of WO2015/166272 relies on the choice of a suitable recognition sequence at specific loci in a genome of a eukaryotic cell to allow for the generation of a library characterized by a high diversity of binders and/or a uniform integration of binders and/or and a uniform transcription of binders. WO2015/166272 does not provide an extensive list of such recognition sequences or loci.

[0004] Thus, there is a continuing need in the art for a method for identifying a locus in a genome of a eukaryotic cell, said locus being a candidate for insertion of binder sequences, and for specific loci in a genome of a eukaryotic comprising suitable recognition sequences which may be used in a method for producing a library.

### SUMMARY

[0005] In an aspect, there is provided a method for identifying a locus in a genome of a eukaryotic cell, said locus being a candidate for insertion of binder sequences, said method comprising:
[0006] a. providing a landing pad sequence;
[0007] b. introducing the landing pad sequence into the eukaryotic cell;
[0008] c. randomly integrating the landing pad sequence into the genome of the eukaryotic cell via transposon-mediated integration;
[0009] d. selecting a clone having a landing pad sequence integrated into its genome.

[0010] A method according to this aspect may be called “a method for identifying a locus according to the invention” or “a method for identifying a locus” or the like in the context of this application.

[0011] In some embodiments, a method for identifying a locus according to the invention comprises the further steps of:
[0012] e. screening for single-copy integration;
[0013] f. identifying the locus.

[0014] In some embodiments, a method for identifying a locus according to the invention comprises the additional steps of:
[0015] g. integrating a donor DNA sequence comprising one or more transgenes encoding a binder at the landing pad sequence;
[0016] h. screening for integration of the donor DNA.

[0017] In some embodiments, a method for identifying a locus according to the invention is such that the landing pad sequence comprises a recognition sequence for a site-specific nuclease. Preferably, the nuclease recognition sequence is a meganuclease recognition sequence, a zinc finger nuclease recognition sequence, a TALE nuclease recognition sequence or a nucleic acid guided nuclease recognition sequence, more preferably a meganuclease recognition sequence, most preferably a I-SceI meganuclease recognition sequence.

[0018] In some embodiments, a method for identifying a locus according to the invention is such that step g of integrating the donor DNA into the cells comprises providing a site-specific nuclease within the cells, wherein the nuclease cleaves the recognition sequence comprised in the landing pad. In some embodiments, a method for identifying a locus according to the invention is such that step h of screening for integration of the donor DNA comprises screening for display of the one or more binders encoded by the donor DNA. In some embodiments, the donor DNA further comprises homology arms to increase integration efficiency. In some embodiments, the landing pad sequence and/or the donor DNA sequence comprise a selectable marker.

[0019] In an aspect, there is provided the use of the locus identified in a method for identifying a locus according to the invention for building a library of eukaryotic cell clones containing DNA encoding a diverse repertoire of binders. A use according to this aspect may be called “a use of a locus according to the invention” or the like in the context of this application.

[0020] In an aspect, there is provided a method for producing a library of eukaryotic cell clones containing DNA encoding a diverse repertoire of binders, comprising:
[0021] providing donor DNA molecules encoding the binders, and eukaryotic cells;
[0022] introducing the donor DNA into the cells and providing a site-specific nuclease within the cells, wherein the nuclease cleaves a recognition sequence in cellular DNA, wherein the recognition sequence is in an NLN gene, a TNIK gene, a PARP11 gene, a RAB40B gene, an ABI2 gene, an RNF19B gene, a PKIA gene, or an FTCD gene, to create an integration site at which the donor DNA becomes integrated into the cellular DNA, integration occurring through DNA repair mechanisms endogenous to the cells, thereby creating recombinant cells containing donor DNA integrated in the cellular DNA; and
[0023] culturing the recombinant cells to produce clones, thereby providing a library of eukaryotic cell clones containing donor DNA encoding the repertoire of binders.

[0024] A method according to this aspect may be called “a method for generating a library according to the invention” or “a method for generating a library” or “a method for producing a library” or the like in the context of this application. “A method according to the invention” refers to both a method for identifying a locus according to the invention and a method for generating a library according to the invention.

[0025] In some embodiments, a method for generating a library according to the invention is such that the recognition sequence is in an NLN gene, a TNIK gene or a RAB40B gene. Preferably the recognition sequence is in an NLN gene.

[0026] In some embodiments, a method for generating a library according to the invention is such that the recognition sequence is in an intron of the gene. In some embodiments, the recognition sequence is in an open chromatin region of the intron. In some embodiments, the recognition sequence is in an enhancer region of the intron.

[0027] For multimeric binders comprising at least a first and second subunit (i.e., separate polypeptide chains, such as antibody VH and VL domains presented within a Fab or IgG format), the multiple subunits may be encoded on the same molecule of donor DNA. However, it may be desirable to integrate the different subunits into separate loci, in which case the subunits can be provided on separate donor DNA molecules. These could be integrated within the same cycle of nuclease-directed integration or they may be integrated sequentially using nuclease-directed integration for one or both integration steps.

[0028] Methods of producing libraries of eukaryotic cell clones encoding multimeric binders may comprise:
[0029] providing eukaryotic cells containing DNA encoding the first subunit, and providing donor DNA molecules encoding the second binder subunit.
[0030] introducing the donor DNA into the cells and providing a site-specific nuclease within the cells, wherein the nuclease cleaves a recognition sequence in cellular DNA, wherein the recognition sequence is in an NLN gene, a TNIK gene, a PARP11 gene, a RAB40B gene, an ABI2 gene, an RNF19B gene, a PKIA gene, or an FTCD gene, to create an integration site at which the donor DNA becomes integrated into the cellular DNA, integration occurring through DNA repair mechanisms endogenous to the cells, thereby creating recombinant cells which contain donor DNA integrated in the cellular DNA. These recombinant cells will contain DNA encoding the first and second subunits of the multimeric binder, and may be cultured to express both subunits. Multimeric binders are obtained by expression and assembly of the separately encoded subunits.

[0031] In the above example, nuclease-directed integration is used to integrate DNA encoding a second subunit into cells already containing DNA encoding a first subunit. The first subunit could be previously introduced using the techniques of the present invention or any other suitable DNA integration method. An alternative approach is to use nuclease-directed integration in a first cycle of introducing donor DNA, to integrate a first subunit, followed by introducing the second subunit either by the same approach or any other suitable method. If the nuclease-directed approach is used in multiple cycles of integration, different site-specific nucleases may optionally be used to drive nuclease-directed donor DNA integration at different recognition sites. A method of producing libraries of eukaryotic cell clones encoding multimeric binders may comprise:
[0032] providing first donor DNA molecules encoding the first subunit, and providing eukaryotic cells
[0033] introducing the first donor DNA into the cells and providing a site-specific nuclease within the cells, wherein the nuclease cleaves a recognition sequence in cellular DNA, wherein the recognition sequence is in an NLN gene, a TNIK gene, a PARP11 gene, a RAB40B gene, an ABI2 gene, an RNF19B gene, a PKIA gene, or an FTCD gene, to create an integration site at which the donor DNA becomes integrated into the cellular DNA, integration occurring through DNA repair mechanisms endogenous to the cells, thereby creating a first set of recombinant cells containing first donor DNA integrated in the cellular DNA,
[0034] culturing the first set of recombinant cells to produce a first set of clones containing DNA encoding the first subunit,
[0035] introducing second donor DNA molecules encoding the second subunit into cells of the first set of clones, wherein the second donor DNA is integrated into cellular DNA of the first set of clones, thereby creating a second set of recombinant cells containing first and second donor DNA integrated into the cellular DNA, and
[0036] culturing the second set of recombinant cells to produce a second set of clones, these clones containing DNA encoding the first and second subunits of the multimeric binder,
[0037] thereby providing a library of eukaryotic cell clones containing donor DNA encoding the repertoire of multimeric binders.

[0038] “A method for generating a library according to the invention” and “a method according to the invention” as used herein also refer to the above methods of producing libraries of eukaryotic cell clones encoding multimeric binders.

[0039] Site-specific integration of donor DNA into cellular DNA creates recombinant cells, which can be cultured to produce clones. Individual recombinant cells into which the donor DNA has been integrated are thus replicated to generate clonal populations of cells—“clones”—each clone being derived from one original recombinant cell. Thus, the method generates a number of clones corresponding to the number of cells into which the donor DNA was successfully integrated. The collection of clones form a library encoding the repertoire of binders (or, at an intermediate stage where binder subunits are integrated in separate rounds, the clones may encode a set of binder subunits). Methods of the invention can thus provide a library of eukaryotic cell clones containing donor DNA encoding the repertoire of binders.

[0040] Accordingly, in an aspect, there is provided a library of eukaryotic cell clones containing DNA encoding a diverse repertoire of binders, wherein the library is obtained via use of a locus according to the invention and/or via a method for generating a library according to the invention. Such libraries according to this aspect may be called a “library of the invention” or the like in the context of this application.

[0041] Methods of the invention can generate libraries of clones containing donor DNA integrated at a fixed locus, or at multiple fixed loci, in the cellular DNA. By “fixed” it is meant that the locus is the same between cells.

[0042] Cells used for creation of the library may therefore contain a nuclease recognition sequence at a fixed locus, representing a universal landing site in the cellular DNA at which the donor DNA can integrate. The recognition sequence for the site-specific nuclease may be present at one or more than one position in the cellular DNA. Accordingly, in an aspect, there is provided an in vitro library of eukaryotic cell clones that express a diverse repertoire of at least 10\hat{ }3, 10\hat{ }4, 10\hat{ }5, 10\hat{ }6, 10\hat{ }7, 10\hat{ }8 or 10\hat{ }9 different binders, each cell containing recombinant DNA wherein donor DNA encoding a binder or subunit of a binder is integrated in a fixed locus in the cellular DNA, the locus being identified by a method according to the invention. Also provided is an in vitro library of eukaryotic cell clones according to the invention, wherein donor DNA encoding a binder or subunit of a binder is integrated in at least a first and/or a second fixed locus in the cellular DNA, wherein said fixed locus or loci are identified by a method according to the invention. A “library of the invention” or the like as used herein also refers to such an in vitro library of eukaryotic cell clones.

[0043] Libraries produced according to the present invention may be employed in a variety of ways. A library may be cultured to express the binders, thereby producing a diverse repertoire of binders. A library may be screened for a cell of a desired phenotype, wherein the phenotype results from expression of a binder by a cell. Accordingly, in an aspect, there is provided a method of screening for a cell of a desired phenotype, wherein the phenotype results from expression of a binder by the cell, the method comprising
[0044] providing a library via the method for producing a library of the invention, or providing a library via the use of a locus according to the invention, or providing a library according to the invention,
[0045] culturing the library cells to express the binders, and
[0046] detecting whether the desired phenotype is exhibited.

[0047] A method according to this aspect may be called “a method of screening for a cell of a desired phenotype according to the invention” or the like. “A method according to the invention” as used herein also refers to the above method of screening for a cell of a desired phenotype.

[0048] Phenotype screening is possible in which library cells are cultured to express the binders, followed by detecting whether the desired phenotype is exhibited in clones of the library. Cellular read-outs can be based on alteration in cell behaviour such as altered expression of endogenous or exogenous reporter genes, differentiation status, proliferation, survival, cell size, metabolism or altered interactions with other cells. When the desired phenotype is detected, cells of a clone that exhibits the desired phenotype may then be recovered. Optionally, DNA encoding the binder is then isolated from the recovered clone, providing DNA encoding a binder which produces the desired phenotype when expressed in the cell.

[0049] A key purpose for which eukaryotic cell libraries have been used is in methods of screening for binders that recognise a target of interest. Accordingly, in an aspect, there is provided a method for screening to identify a binder to a target of interest, said method comprising:
[0050] providing a library via the method for producing a library of the invention, or providing a library via the use of a locus according to the invention, or providing a library according to the invention,
[0051] culturing cells of the library to express the binders,
[0052] exposing the binders to the target, allowing recognition of the target by one or more cognate binders, if present, and
[0053] detecting whether the target is recognised by a cognate binder.

[0054] A method according to this aspect may be called “a method for screening to identify a binder to a target of interest according to the invention” or “a method for screening to identify a binder” or the like. “A method according to the invention” as used herein also refers to the above method for screening to identify a binder 20 to a target of interest.

[0055] In such methods a library is cultured to express the binders, and the binders are exposed to the target to allow recognition of the target by one or more cognate binders, if present, and detecting whether the target is recognised by a cognate binder. In such methods, binders may be displayed on the cell surface and those clones of the library that display binders with desired properties can be isolated. Thus cells incorporating genes encoding binders with desired functional or binding characteristics could be identified within the library. The genes can be recovered and used for production of the binder or used for further engineering to create derivative libraries of binders to yield binders with improved properties.

[0056] In an aspect, the invention also encompasses a binder that has been identified from a library of the invention, for example a binder that was identified using a method for screening to identify a binder to a target of interest according to the invention. Preferred binders are described elsewhere herein.

[0057] Various features of the invention are further described below. It is noted that headings used throughout this specification are to assist navigation only and should not be interpreted as definitive, and that features described in different sections may be relevant for all aspects of the invention and may be combined as appropriate.

### DETAILED DESCRIPTION

[0058] As shown in the experimental part, aspects of this invention such as the new loci of the invention are associated with advantages such as increased integration efficiencies and stable antibody expression.

### Eukaryotic Cells

[0059] Preferred eukaryotic cells and eukaryotic cell clones for aspects of this invention including the methods, uses and libraries of the invention are defined below. It is understood that all preferences relating to eukaryotic cells may also be applied to eukaryotic cell clones.

[0060] Eukaryotic cells are preferably higher eukaryotic cells, defined here as cells with a genome greater than that of Saccharomyces cerevisiae which has a genome size of 12×10⁶ base pairs (bp). The higher eukaryotic cells may for example have a genome size of greater than 2×10⁷ base pairs. This includes, for example, mammalian, avian, insect or plant cells. A eukaryotic cell is not limited to a mammalian cell. Preferably eukaryotic cells are mammalian cells, e.g., mouse or human. More preferably, eukaryotic cells are human cells. The eukaryotic cells may be primary cells or may be cell lines. Chinese hamster ovary (CHO) cells are commonly used for antibody and protein expression but any alternative stable cell line such as HEK293 cells may be used in the invention. Methods are available for efficient introduction of foreign DNA into primary cells allowing these to be used (e.g., by electroporation where efficiencies and viabilities up to 95% have been achieved http://www.maxcyte.com/technology/primary-cells-stem-cells.php).

[0061] A particular benefit of nuclease-directed integration comprised in a method for identifying a locus or in a method for generating a library relates to integration of binder genes into higher eukaryotic cells with larger genomes where homologous recombination in the absence of nuclease cleavage is less effective. Yeast (e.g., Saccharomyces cerevisiae) has a smaller genome than mammalian cells and homologous recombination directed by homology arms (in the absence of nuclease-directed cleavage) is an effective way of introducing foreign DNA compared to higher eukaryotes. Nuclease-directed integration has been used in yeast cells to solve the problem of efficient integration of multiple genes into individual yeast cells, e.g., for engineering of metabolic pathways (US2012/0277120), but this work does not incorporate introduction of libraries of binders nor does it address the problems of library construction in higher eukaryotes.

[0062] Preferred eukaryotic cells are T lymphocyte lineage cells (e.g., primary T cells or a T cell line) or B lymphocyte lineage cells. Of particular preference are primary T-cells or T cell derived cell lines for use in TCR libraries including cell lines which lack TCR expression [23, 24, 25]. Preferred B lymphocyte lineage cells are B cells, pre-B cells or pro-B cells and cell lines derived from any of these.

[0063] Construction of libraries in primary B cells or B cell lines would be of particular value for construction of antibody libraries. These eukaryotic cells are preferred in methods for identifying a locus and for producing a library. Breous-Nystrom et al. have generated libraries in a murine pre-B cell line (1624-5). The chicken B cell derived cell line DT40 (ATCC CRL-2111) has particular promise for construction of libraries of binders. DT40 is a small cell line with a relatively rapid rate of cell division. Repertoires of binders could be targeted to specific loci using ZFNs, TALE nucleases or CRISPR/Cas9 targeted to endogenous sequences or by targeting pre-integrated heterologous sites which could include meganuclease recognition sites. DT40 cells express antibodies and so it will be advantageous to target antibody genes within the antibody locus either with or without disruption of the endogenous chicken antibody variable domains. DT40 cells have also been used as the basis of an in vitro system for generation of chicken IgMs termed the Autonomously Diversifying Library system (ADLib system) which takes advantage of intrinsic diversification occurring at the chicken antibody locus. As a result of this endogenous diversification it is possible to generate novel specificities. The nuclease-directed approach described here could be used in combination with ADLib to combine diverse libraries of binders from heterologous sources (e.g., human antibody variable region repertoires or synthetically derived alternative scaffolds) with the potential for further diversification with the chicken IgG locus. Similar benefits could apply to human B cell lines such as Nalm6 [26].

[0064] Other preferred B lineage cell lines preferred in methods for identifying a locus and for producing a library include lines such as the murine pre-B cell line 1624-5 and the pro-B cell line Ba/F3. Ba/F3 is dependent on IL-3 and its use is discussed elsewhere herein. Finally a number of human cell lines are preferred including those listed in the “Cancer Cell Line Encyclopaedia” or “COSMIC catalogue of somatic mutations in cancer” [29].

[0065] In a method for producing a library as well as in libraries according to the invention, the eukaryotic cells are preferably of a single type of cells, produced by introduction of donor DNA into a population of clonal eukaryotic cells, for example by introduction of donor DNA into cells of a particular cell line. The main significant difference between the different library clones will then be due to integration of the donor DNA.

### Eukaryotic Viral Systems

[0066] The advantages of the aspects of the present invention, such as the methods for producing a library of eukaryotic cell clones, and the resulting libraries, could be applied to viral display systems based around eukaryotic expression systems, e.g., baculoviral display or retroviral display [1, 2, 3, 4]. In this approach each cell will encode a binder capable of being incorporated into a viral particle. In the case of retroviral systems the encoding mRNA would be packaged and the encoded binder would be presented on the cell surface. In the case of baculoviral systems, genes encoding the binder would need to be encapsulated into the baculoviral particle to maintain an association between the gene and the encoded protein. This could be achieved using host cells carrying episomal copies of the baculoviral genome. Alternatively integrated copies could be liberated following the action of a specific nuclease (distinct from the one used to drive site-specific integration). In the case of multimeric binder molecules some partners could be encoded within the cellular DNA with the genes for one or more partners being packaged within the virus.

### Introduction of Nucleic Acids

[0067] The methods described herein comprise the introduction of nucleic acids into a eukaryotic cell. In a method for identifying a locus, the landing pad sequence (i.e. a nucleic acid) is introduced, and preferably a donor DNA sequence introduced. In a method for generating a library, donor DNA molecules are introduced. Unless specifically mentioned otherwise, the introduction of a nucleic acid refers to the introduction of a DNA molecule in a eukaryotic cell.

[0068] Numerous methods have been described for introducing nucleic acids into eukaryotic cells, including transfection, infection or electroporation. Transfection of large numbers of cells is possible by standard methods including polyethyleneimine—mediated transfection as described herein. In addition methods are available for highly efficient electroporation of 10¹⁰ cells in 5 minutes, e.g., http://www.maxcyte.com. In a method for generating a library, combinatorial libraries could be created wherein members of multimeric binding pairs (e.g., VH and VL genes of antibody genes) or even different parts of the same binder molecule are introduced on different plasmids. Introduction of separate donor DNA molecules encoding separate binders or binder subunits may be done simultaneously or sequentially. For example an antibody light chain could be introduced by transfection or infection, the cells grown up and selected if necessary. Other components could then be introduced in a subsequent infection or transfection step. One or both steps could involve nuclease-directed integration to specific genomic loci.

### Integration of Nucleic Acids

[0069] A method for identifying a locus or a method for generating a library involves the integration of nucleic acids into the genome of the eukaryotic cell. In this context, the terms genome and cellular DNA may be used interchangeably. Unless explicitly mentioned otherwise, integration refers to the integration of a DNA molecule into the genome of a eukaryotic cell. The nucleic acid is integrated into the genome (i.e. cellular DNA), forming recombinant DNA having a contiguous DNA sequence in which the nucleic acid is inserted at the integration site. In the present invention, integration is mediated by the natural DNA repair mechanisms that are endogenous to the cell.

[0070] Integration of a nucleic acid may be random or specific. The random integration of a nucleic acid preferably refers to the random integration of the nucleic acid into the genome of a eukaryotic cell via transposon-mediated integration. Herein, the integration site is not defined by a specific sequence. A method for identifying a locus comprises the random integration of the landing pad sequence into the eukaryotic cell. The term “transposon” or “transposon vector” or “transposable element” is used herein as customarily and ordinarily understood by the skilled person. Transposons are genetic elements which may integrate into cellular DNA in a non-site-specific manner and, when engineered to carry or flank a landing pad sequence, cause this sequence to be inserted at a random location in the cellular DNA. The skilled person is aware of suitable transposons, many of which are commercially available, such as the PiggyBac system, an example of which is provided in the experimental section herein. The PiggyBac system is further described in for example Wilson et al. Molecular Therapy vol. 15 no. 1, 139-145 January 2007; Kim et al. Mol Cell Biochem (2011) 354:301-309); Galvan et al. Immunother. 2009 October; 32 (8): 837-844. Generally, the PiggyBac system utilizes two vectors. One vector, referred to as the helper PBase vector, encodes a transposase. The other vector, referred to as the transposon vector, contains two terminal repeats (TRs) bracketing the region to be transposed. The landing pad to be delivered into host cells may be cloned into this region using molecular techniques which are standard in the art. When the PBase vector and the PiggyBac transposon vector are co-transfected into target cells, the transposase produced from the helper recognizes the two TRs on the transposon, and inserts the flanked region including the two TRs into the host cellular DNA. Integration typically occurs at host chromosomal sites that contain a TTAA sequence, which is duplicated on the two flanks of the integrated fragment. The transposon may be integrated into the host cell's genome into a single locus (single-copy integration) or multiple loci (multiple-copy integration).

[0071] In specific integration of a nucleic acid the integration site is defined by a specific sequence. The nucleic acid in the context of specific integration may be called the donor DNA, the donor DNA molecule or the donor DNA sequence.

[0072] Specific integration can be allowed to occur by introducing the nucleic acid into a cell, allowing the site-specific nuclease to create an integration site, and allowing the donor DNA to be integrated. In this context, specific integration may also be called nuclease-directed integration. Cells may be kept in culture for sufficient time for the DNA to be integrated. This will usually result in a mixed population of cells, including (i) recombinant cells into which the donor DNA has integrated at the integration site created by the site-specific nuclease, and optionally (ii) cells in which donor DNA has integrated at sites other than the desired integration site and/or optionally (iii) cells that into which donor DNA has not integrated. The desired recombinant cells and the resulting clones may thus be provided in a mixed population further comprising other eukaryotic cells. Selection methods described elsewhere herein may be used to selected the desired cells and clones, or to enrich said mixed population in said desired cells and clones.

[0073] As explained above, integration is mediated by the natural DNA repair mechanisms that are endogenous to the cell. Endogenous DNA repair mechanisms in eukaryotic cells include homologous recombination, non-homologous end joining (NHEJ) and microhomology-directed end joining. The efficiency of integration by such processes can be increased by the introduction of double stranded breaks (DSBs) in the cellular DNA and efficiency gains of 40,000 fold have been reported using rare cutting endonucleases (meganucleases) such as I-Sce1 [48, 49, 50].

[0074] Unlike the site-specific recombination involved in systems such as the Flp-In system [16], integration in the present invention does not require exogenous recombinases or engineered recombinase recognition sites. Therefore, a method for identifying a locus and a method for generating a library preferably do not include a step of recombinase-mediated integration of a DNA molecule. Furthermore, the eukaryotic cells in a method for identifying a locus and in a method for generating a library preferably lack a recombination site for a site-specific recombinase. The mechanisms and practicalities of specific integration of donor DNA into cellular DNA by recombinases and nucleases are very distinct as discussed by Jasin 1996 [50].

[0075] In contrast specific integration comprising the use of site-specific nuclease involves the nuclease act to create breaks or nicks within the cellular DNA, which are exposed to and repaired by endogenous cellular repair mechanisms such as homologous recombination or NHEJ. Recombinase-based approaches have an absolute requirement for pre-integration of their recognition sites, so such methods require engineering of the “hot spot” integration site into the cellular DNA as a preliminary step. With nuclease-directed integration it is possible to engineer nucleases or direct via guide RNA in the case of CRISPR: Cas9 to recognise endogenous recognition sequences, i.e., nucleic acid sequences occurring naturally in the cellular DNA. Finally, at a practical level nuclease-directed approaches are more efficient for specific integration of transgenes at the levels required to make large libraries of binders.

[0076] The DNA repair mechanism by which the donor DNA is integrated in a method for identifying a locus or in a method for generating a library can be pre-determined or biased to some extent by design of the donor DNA and/or choice of site-specific nuclease.

[0077] Homologous recombination is a natural mechanism used by cells to repair double stranded breaks using homologous sequence (e.g., from another allele) as a template for repair. Homologous recombination has been utilised in cellular engineering to introduce insertions (including transgenes), deletions and point mutations into the genome. Homologous recombination is promoted by providing homology arms on the donor DNA. Hence, the donor DNA preferably comprises homology arms. The original approach to engineering higher eukaryotic cells typically used homology arms of 5-10 kb within a donor plasmid to increase efficiency of targeted integration into the site of interest. Homologous recombination is particularly suitable for eukaryotes such as yeast, which has a genome size of only 12.5×10⁶ bp, where it is more effective compared with higher eukaryotes with larger genomes e.g., mammalian cells with 3000×10⁶ bp.

[0078] Homologous recombination can also be directed through nicks in cellular DNA and this could also serve as a route for nuclease-directed integration into cellular DNA. Hence, the integration of donor DNA comprised in a method for identifying a locus or method for generating a library preferably comprised the introduction of nicks in the cellular DNA. Two distinct pathways have been shown to promote homologous recombination at nicked DNA. One is essentially similar to repair at double strand breaks, utilizing Rad51/Brca2, while the other is inhibited by Rad51/Brca2 and preferentially uses single-stranded DNA or nicked double stranded donor DNA [51].

[0079] Non-homologous end-joining (NHEJ) is an alternative mechanism to repair double stranded breaks in the genome where the ends of DNA are directly re-ligated without the need for a homologous template. Nuclease-directed cleavage of genomic DNA can also enhance transgene integration via non-homology based mechanisms. NHEJ provides a simple means of integrating in-frame exons into intron or allows integration of promoter: gene cassettes into the genome. Use of non-homologous methods allows the use of donor vectors which lack homology arms thereby simplifying the construction of donor DNA.

[0080] It has been pointed out that short regions of terminal homology are used to re-join DNA ends and it was hypothesized that 4 bp of microhomology might be utilized for directing repairing at double strand breaks, referred to as microhomology-directed end joining [50].

### Site-Specific Nuclease

[0081] The invention involves the use of site-specific nucleases and their recognition sequences. On the one hand, a method for identifying a locus comprises providing a landing pad sequence, wherein the landing pad sequence preferably comprises a recognition sequence for a site-specific nuclease. More preferably, the method comprises providing a site-specific nuclease within the cells, wherein the nuclease cleaves the recognition sequence comprised in the landing pad. On the other hand, a method for generating a library involves providing a site-specific nuclease which cleaves a recognition sequence in cellular DNA. Preferred site-specific nucleases are defined below. It is understood that all preferences relating to site-specific nuclease may also be applied mutatis mutandis to the corresponding recognition sites.

[0082] The site-specific nuclease cleaves cellular DNA following specific binding to a recognition sequence, thereby creating an integration site for donor DNA. In this context, the terms site, target site, recognition site and recognition sequence may be used interchangeably. The nuclease may create a double strand break or a single strand break (a nick). Nuclease-mediated DNA cleavage enhances site-specific integration of binder genes through endogenous cellular DNA repair mechanisms.

[0083] In a method for identifying a locus or in a method for generating a library, the eukaryotic cells used may contain endogenous sequences recognized by the site-specific nuclease or the recognition sequence may be engineered into the cellular DNA. Furthermore, the site-specific nuclease may be exogenous to the cells, i.e. not occurring naturally in cells of the chosen type.

[0084] In a method for identifying a locus or in a method for generating a library, the site-specific nuclease can be introduced before, after or simultaneously with introduction of the donor DNA. It may be convenient for the donor DNA to encode the nuclease in addition to a binder, or on separate nucleic acid which is co-transfected or otherwise introduced at the same time as the donor DNA. Clones of a library may optionally retain nucleic acid encoding the site-specific nuclease, or such nucleic acid may be only transiently transfected into the cells.

[0085] In embodiments, a method for identifying a locus according to the invention comprises a step of integrating a donor DNA into the cells, as defined elsewhere herein, wherein said step comprises providing a site-specific nuclease within the cells, wherein the nuclease cleaves the recognition sequence comprised in the landing pad.

[0086] Any suitable site-specific nuclease may be used with the invention. It may be a naturally occurring enzyme or an engineered variant. There are a number of known nucleases that are especially suitable, such as those which recognise, or can be engineered to recognise, sequences that occur only rarely in cellular DNA.

[0087] Preferably, the site-specific nuclease recognizes only one or two distinct recognition sequences. This is advantageous since this should ensure that only one or two molecules of donor DNA are integrated per cell. Rarity of the sequence recognised by the site-specific nuclease is more likely if the recognition sequence is relatively long. Preferably, the recognition sequence has a length of at least 10, 11, 12, 13, 14, 15, 16, 17, 18, 19, 20, 21, 22, 23, 24, 25, 26, 27, 28, 29, or 30 nucleotides. Preferably, the recognition sequence has a length from 10 up to 40, 39, 38, 37, 36, 35, 34, 33, 32, 31, 30, 29, 28, 27, 26, 25, 24, 23, 22, 21 or 20 nucleotides, or from 12 up to 40, 39, 38, 37, 36, 35, 34, 33, 32, 31, 30, 29, 28, 27, 26, 25, 24, 23, 22, 21 or 20 nucleotides.

[0088] Preferred site-specific nucleases are meganucleases, zinc finger nucleases (ZFNs), TALE nucleases, and nucleic acid-guided (e.g., RNA-guided) nucleases such as the CRISPR/Cas system. Each of these produces double strand breaks although engineered forms are known which generate single strand breaks. In embodiments, the landing pad sequence comprises a corresponding nuclease recognition sequence.

[0089] Meganucleases (also known as homing endonucleases) are nucleases which occur across all the kingdoms of life and recognise relatively long sequences (12-40 bp). Given the long recognition sequence they are either absent or occur relatively infrequently in eukaryotic genomes. Meganucleases are grouped into 5 families based on sequence/structure. (LAGLIDADG (SEQ ID NO: 76), GIY-YIG (SEQ ID NO: 77), HNH, His-Cys box and PD-(D/E) XK families). The best studied family is the LAGLIDADG family which includes the well characterised I-SceI meganuclease from Saccharomyces cerevisiae. I-SceI recognises and cleaves an 18 bp recognition sequence (5′ TAGGGATAACAGGGTAAT, SEQ ID NO: 70) leaving a 4 bp 3′ overhang. Another commonly used example is I-CreI which originates from the chloroplast of the unicellular green algae of Chlamydomonas reinhardtii, and recognizes a 22 bp sequence [30]. A number of engineered variants have been created with altered recognition sequences [31]. Meganucleases represent the first example of the use of site-specific nucleases in genome engineering [49, 50]. As with recombinase-based approaches, use of I-SceI and other meganucleases requires prior insertion of an appropriate recognition sequence to be targeted within the genome or engineering of meganucleases to recognize endogenous recognition sequences [30]. By this approach targeting efficiency in HEK293 cells (as judged by homology-directed “repair” of an integrated defective GFP gene) was achieved in 10-20% of cells through the use of I-SceI [32].

[0090] A preferred class of meganucleases is the LAGLIDADG endonucleases. These include I-SceI, I-ChuI, I-Cre I, CsmI, PI-SceI, PI-TliI, PI-MtuI, I-CeuI, I-SceII, I-SceIII, HO, Pi-CivI, PI-CtrI, PI-AaeI, PI-BsuI, PI-DhaI, PI-DraI, PI-MavI, PI-MchI, PI-Mfu, PI-MflI, PI-MgaI, PI-MgoI, PI-MinI, PI-MkaI, PI-MieI, PI-MrnaI, PI-MshI, PI-MsmI, PI-MthI, PI-Mtu, PI-MxeI, PI-NpuI, PI-PfuI, PI-RmaI, PI-SpbI, PI-SspI, PI-FacI, PI-MjaI, PI-PhoI, Pi-TagI, PI-ThyI, PI-Tko I, I-MsoI, and PI-TspI; preferably, I-SceI, I-CreI, I-ChuI, I-DmoI, I-CsmI, PI-SceI, PI-PfuI, PI-TliI, PI-MtuI, and I-CeuI. In embodiments, the landing pad sequence comprises a corresponding nuclease recognition sequence.

[0091] In recent years a number of methods have been developed which allow the design of novel sequence-specific nucleases by fusing sequence-specific DNA binding domains to non-specific nucleases to create designed sequence-specific nucleases directed through bespoke DNA binding domains. Binding specificity can be directed by engineered binding domains such as zinc finger domains. These are small modular domains, stabilized by Zinc ions, which are involved in molecular recognition and are used in nature to recognize DNA sequences. Arrays of zinc finger domains have been engineered for sequence specific binding and have been linked to the non-specific DNA cleavage domain of the type II restriction enzyme Fok1 to create zinc finger nucleases (ZFNs). Such ZFNs are preferred site-specific nucleases herein. ZFNs can be used to create double stranded break at specific sites within the genome. Fok1 is an obligate dimer and requires two ZFNs to bind in close proximity to effect cleavage. The specificity of engineered nucleases has been enhanced and their toxicity reduced by creating two different Fok1 variants which are engineering to only form heterodimers with each other [33]. Such obligate heterodimer ZFNs have been shown to achieve homology-directed integration in 5-18% of target cells without the need for drug selection [21, 34, 35]. Incorporation of inserts up to 8 kb with frequencies of >5% have been demonstrated in the absence of selection.

[0092] The ability to engineer DNA binding domains of defined specificity has been further simplified by the discovery in Xanathomonas bacteria of Transcription activator-like effectors (TALE) molecules. These TALE molecules consist of arrays of monomers of 33-35 amino acids with each monomer recognising a single base within a target sequence [37]. This modular 1:1 relationship has made it relatively easy to design engineered TALE molecules to bind any DNA target of interest. By coupling these designed TALEs to Fok1 it has been possible to create novel sequence-specific TALE-nucleases. TALE nucleases, also known as TALENs, are preferred site-specific nucleases in this application and have been designed to a large number of sites (i.e. recognition sequences) and exhibit high success rate for efficient gene modification activity [38]. Other variations and enhancements of TALE nuclease technology have been developed and could be used as site-specific nucleases in methods for identifying a locus or in methods for generating a library. These included “mega-TALENs” where a TALE nuclease binding domain is fused to a meganuclease and “compact TALENs” where a single TALE nuclease recognition domain is used to effect cleavage [40]. In recent years another system for directing double- or single-stranded breaks to specific sequences in the genome has been described. This system called “Clustered Regularly Interspaced Short Palindromic Repeats (CRISPR) and CRISPR Associated (Cas)” system is based on a bacterial defence mechanism [41]. The CRISPR/Cas system is a preferred site-specific nuclease in a method for identifying a locus or in a method for generating a library. The CRISPR/Cas system targets DNA for cleavage via a short, complementary single-stranded RNA (CRISPR RNA or crRNA) adjoined to a short palindromic repeat. In the commonly used “Type II” system, the processing of the targeting RNA is dependent on the presence of a trans-activating crRNA (tracrRNA) that has sequence complementary to the palindromic repeat. Hybridization of the tracrRNA to the palindromic repeat sequence triggers processing. The processed RNA activates the Cas9 domain and directs its activity to the complementary sequence within DNA. The system has been simplified to direct Cas9 cleavage from a single RNA transcript and has been directed to many different sequences within the genome [42, 43]. This approach to genome cleavage has the advantage of being directed via a short RNA sequence making it relatively simple to engineer cleavage specificity. Thus there are a number of different ways to achieve site-specific cleavage of genomic DNA. As described above this enhances the rate of integration of a donor plasmid through endogenous cellular DNA repair mechanisms.

[0093] In a method for generating a library, use of meganucleases, ZFNs, TALE nuclease or nucleic acid guided systems such as the CRISPR/Cas9 systems as site-specific nucleases will enable targeting of endogenous loci within the genome.

[0094] Alternatively, in a method for identifying a locus and in a method for generating a library, heterologous recognition sites (i.e. recognition sequences) for site-specific nucleases, including meganucleases, ZFNs and TALE nucleases could be introduced in advance. Nuclease-directed targeting could be used to drive insertion of recognition sequences by homologous recombination or NHEJ using vector DNA or even double stranded oligonucleotides [45]. As an alternative, non-specific targeting methods could be used to introduce recognition sequences for site-specific nucleases through the use of transposon-directed integration [46]. Viral-based systems, such as lentivirus, applied at low titre could also be used to introduce recognition sequences.

[0095] The site-specific nuclease may be encoded by a single gene that is introduced on one plasmid, whereas the donor DNA is present on a second plasmid. Of course, combinations could be used incorporating two or more of these elements on the same plasmid and this could enhance the efficiency of targeting by reducing the number of number of plasmids to be introduced in a method for identifying a locus or a method for generating a library. In addition it may be possible to pre-integrate the nuclease(s) which could also be inducible to allow temporal control of nuclease activity as has been demonstrated for transposases [46].

[0096] Finally the nuclease could be introduced as recombinant protein or protein: RNA complex (for example in the case of an RNA directed nuclease such as CRISPR: Cas9).

### Recognition Sequences

[0097] As noted, a method for generating a library involves providing a site-specific nuclease which cleaves a recognition sequence in cellular DNA.

[0098] In some embodiments, the recognition sequence is in a neurolysin (NLN) gene. The eukaryotic cells used may contain endogenous sequences recognized by the site-specific nuclease or the recognition sequence may be engineered into the cellular DNA as earlier described herein. The neurolysin gene (human sequence: Uniprot Q9BYT8, ENSEMBL gene id ENSG00000123213) encodes a member of the metallopeptidase M3 protein family that cleaves neurotensin at the Pro10-Tyr11 bond, leading to the formation of neurotensin (1-10) and neurotensin (11-13). An exemplary sequence of a neurolysin gene is represented by SEQ ID NO: 1. In some embodiments, the recognition sequence is in a nucleic acid molecule represented by a nucleotide sequence comprising, consisting essentially of, or consisting of SEQ ID NO: 1, or a nucleotide sequence having at least 60%, 61%, 62%, 63%, 64%, 65%, 66%, 67%, 68%, 69%, 70%, 71%, 72%, 73%, 74%, 75%, 76%, 77%, 78%, 79%, 80%, 81%, 82%, 83%, 84%, 85%, 86%, 87%, 88%, 89%, 90%, 91%, 92%, 93%, 94%, 95%, 96%, 97%, 98%, 99% or 100% identity with SEQ ID NO: 1.

[0099] In some embodiments, the recognition sequence is in a TRAF2 and NCK interacting kinase (TNIK) gene (Uniprot Q9UKE5, ENSEMBL gene id ENSG00000154310). An exemplary sequence of a TNIK gene is represented by SEQ ID NO: 2. In some embodiments, the recognition sequence is in a protein mono-ADP-ribosyltransferase 11 (PARP11) gene (Uniprot Q9NR21, ENSEMBL gene id ENSG00000111224). An exemplary sequence of a PARP11 gene is represented by SEQ ID NO: 3. In some embodiments, the recognition sequence is in a RAB40B gene (member RAS oncogene family, Uniprot Q12829, ENSEMBL gene id ENSG00000141542). An exemplary sequence of a RAB40B gene is represented by SEQ ID NO: 4. In some embodiments, the recognition sequence is in an abl interactor 2 (ABI2) gene (Uniprot Q9NYB9, ENSEMBL gene id ENSG00000138443). An exemplary sequence of an ABI2 gene is represented by SEQ ID NO: 5. In some embodiments, the recognition sequence is in a ring finger protein 19B (RNF19B) gene (Uniprot Q6ZMZO, ENSEMBL gene id ENSG00000116514). An exemplary sequence of an RNF19B gene is represented by SEQ ID NO: 6. In some embodiments, the recognition sequence is in a cAMP-dependent protein kinase inhibitor alpha (PKIA) gene (Uniprot P61925, ENSEMBL gene id ENSG00000171033). An exemplary sequence of a PKIA gene is represented by SEQ ID NO: 7. In some embodiments, the recognition sequence is in a formimidoyltransferase cyclodeaminase (FTCD) gene (Uniprot O95954, ENSEMBL gene id ENSG00000160282). An exemplary sequence of an FTCD gene is represented by SEQ ID NO: 8.

[0100] In some embodiments, the recognition sequence is in an NLN gene, a TNIK gene or a RAB40B gene In some embodiments, the recognition sequence is in a nucleic acid molecule represented by a nucleotide sequence comprising, consisting essentially of, or consisting of SEQ ID NOs: 1-8, or a nucleotide sequence having at least 60%, 61%, 62%, 63%, 64%, 65%, 66%, 67%, 68%, 69%, 70%, 71%, 72%, 73%, 74%, 75%, 76%, 77%, 78%, 79%, 80%, 81%, 82%, 83%, 84%, 85%, 86%, 87%, 88%, 89%, 90%, 91%, 92%, 93%, 94%, 95%, 96%, 97%, 98%, 99% or 100% identity with SEQ ID NO: 1-8.

[0101] In some embodiments, the recognition sequence is in an intron of a gene selected from an NLN, TNIK, PARP11, RAB40B, ABI2, RNF19B, PKIA, or FTCD gene, preferably an NLN, TNIK, or RAB40B genes. An intron is used herein as customarily and ordinarily understood by the skilled person.

[0102] A recognition sequence in an intron of NLN is preferably in NLN-207 intron 1 (intron 1-2), intron 2 (intron 2-3) or intron 6 (intron 6-7). A recognition sequence in an intron of TNIK is preferably in TNIK-04 (Ensembl ID ENST00000436636.7) intron 2 (intron 2-3). A recognition sequence in an intron of PARP11 is preferably in PARP11-205 (Ensembl ID ENST00000450737.2) intron 1 (intron 1-2). A recognition sequence in an intron of RAB40B is preferably in RAB40B-206 (Ensembl ID ENST00000571995.6) intron 1 (intron 1-2). A recognition sequence in an intron of ABI2 is preferably in ABI2-203 (Ensembl ID ENST00000261018.12) intron 1 (intron 1-2). A recognition sequence in an intron of RNF19B is preferably in RNF19B-201 (Ensembl ID ENST00000235150.5) intron 1 (intron 1-2). A recognition sequence in an intron of PKIA is preferably in PKIA-202 (Ensembl ID ENST00000396418.7) intron 1 (intron 1-2). A recognition sequence in an intron of FTCD is preferably in FTCDNL1-201 (Ensembl ID ENST00000416668.5) intron 3 (intron 3-4).

[0103] In preferred embodiments, the recognition sequence is in an intron of a neurolysin gene. The canonical transcript of the human neurolysin (NLN) gene is NLN-201 (Ensembl transcript ID: ENST00000380985.10) which comprises 13 exons. An alternative transcript is NLN-207 (Ensembl transcript ID: ENST00000509935.2) which comprises 7 exons. In some embodiments, the recognition sequence is in NLN-201 intron 1 of a neurolysin gene (NLN-201 intron 1-2; exemplary sequence: SEQ ID NO: 9). In some embodiments, the recognition sequence is in NLN-201 intron 2 of a neurolysin gene (NLN-201 intron 2-3; exemplary sequence: SEQ ID NO: 10). In some embodiments, the recognition sequence is in NLN-201 intron 3 of a neurolysin gene (NLN-201 intron 3-4; exemplary sequence: SEQ ID NO: 11). In some embodiments, the recognition sequence is in NLN-201 intron 4 of a neurolysin gene (NLN-201 intron 4-5; exemplary sequence: SEQ ID NO: 12). In some embodiments, the recognition sequence is in NLN-201 intron 5 of a neurolysin gene (NLN-201 intron 5-6; exemplary sequence: SEQ ID NO: 13). In some embodiments, the recognition sequence is in NLN-201 intron 6 of a neurolysin gene (NLN-201 intron 6-7; exemplary sequence: SEQ ID NO: 14). In some embodiments, the recognition sequence is in NLN-201 intron 7 of a neurolysin gene (NLN-201 intron 7-8; exemplary sequence: SEQ ID NO: 15). In some embodiments, the recognition sequence is in NLN-201 intron 8 or NLN-207 intron 1 of a neurolysin gene (NLN-201 intron 8-9 or NLN-207 intron 1-2; exemplary sequence: SEQ ID NO: 16). In some embodiments, the recognition sequence is in NLN-201 intron 9 or NLN-207 intron 2 of a neurolysin gene (NLN-201 intron 9-10 or NLN-207 intron 2-3; exemplary sequence: SEQ ID NO: 17). In some embodiments, the recognition sequence is in NLN-201 intron 10 or NLN-207 intron 3 of a neurolysin gene (NLN-201 intron 10-11 or NLN-207 intron 3-4; exemplary sequence: SEQ ID NO: 18). In some embodiments, the recognition sequence is in NLN-201 intron 11 or NLN-207 intron 4 of a neurolysin gene (NLN-201 intron 11-12 or NLN-207 intron 4-5; exemplary sequence: SEQ ID NO: 19). In some embodiments, the recognition sequence is in intron 12 of a NLN-201 neurolysin gene (NLN-201 intron 12-13; exemplary sequence: SEQ ID NO: 20). In some embodiments, the recognition sequence is in intron 5 of a NLN-207 neurolysin gene (NLN-207 intron 5-6; exemplary sequence: SEQ ID NO: 21). In some embodiments, the recognition sequence is in intron 6 of a NLN-207 neurolysin gene (NLN-207 intron 6-7; exemplary sequence: SEQ ID NO: 22).

[0104] Preferred introns are NLN-207 introns 1, 2, and 6 of an NLN gene. In some embodiments, the recognition sequence is in a nucleic acid molecule represented by a nucleotide sequence comprising, consisting essentially of, or consisting of SEQ ID NOs: 16, 17, 22, or a nucleotide sequence having at least 60%, 61%, 62%, 63%, 64%, 65%, 66%, 67%, 68%, 69%, 70%, 71%, 72%, 73%, 74%, 75%, 76%, 77%, 78%, 79%, 80%, 81%, 82%, 83%, 84%, 85%, 86%, 87%, 88%, 89%, 90%, 91%, 92%, 93%, 94%, 95%, 96%, 97%, 98%, 99% or 100% identity with SEQ ID NOs: 16, 17, 22.

[0105] Preferably, the recognition sequence comprises, consists essentially of, or consists of SEQ ID NO: 15, or a nucleotide sequence having at least 75%, 76%, 77%, 78%, 79%, 80%, 81%, 82%, 83%, 84%, 85%, 86%, 87%, 88%, 89%, 90%, 91%, 92%, 93%, 94%, 95%, 96%, 97%, 98%, 99% or 100% identity with SEQ ID NO: 23.

[0106] In some embodiments, particularly when the recognition sequence is in an intron of a gene selected from an NLN, TNIK, PARP11, RAB40B, ABI2, RNF19B, PKIA, or FTCD gene as described above, the recognition sequence is in an open chromatin region of the intron.

[0107] In some embodiments, particularly when the recognition sequence is in an intron of a gene selected from an NLN, TNIK, PARP11, RAB40B, ABI2, RNF19B, PKIA, or FTCD gene as described above, the recognition sequence is in an enhancer region of the intron.

[0108] As used herein “open chromatin” or “euchromatin” or “loose chromatin” refers to a structure that is permissible for transcription whereas “heterochromatin” or “tight” or “closed” chromatin is more compact and more refractory to factors that need to gain access to the DNA template.

### Distribution of Recognition Sequences

[0109] A recognition sequence for the site-specific nuclease in a method according to the invention may be present in genomic DNA, or episomal DNA which is stably inherited in the cells. Donor DNA may therefore be integrated at a genomic or episomal locus in the cellular DNA. Preferably, a genomic locus is identified via a method for identifying a locus.

[0110] In its simplest form a single gene encoding a binder (binder gene) is targeted to a single site within the eukaryotic genome. Identification of a cell demonstrating a particular binding activity or cellular phenotype will allow direct isolation of the gene encoding the desired property (e.g., by PCR from mRNA or genomic DNA). This is facilitated by using a unique recognition sequence for the site-specific nuclease, occurring once in the cellular DNA. Cells used for creation of the library may thus contain a nuclease recognition sequence at a single fixed locus, i.e., one identical locus in all cells. Libraries produced from such cells will contain donor DNA integrated at the fixed locus, i.e., occurring at the same locus in cellular DNA of all clones in the library.

[0111] Optionally, recognition sequences may occur multiple times in cellular DNA, so that the cells have more than one potential integration site for donor DNA. This would be a typical situation for diploid or polyploid cells where the recognition sequence is present at corresponding positions in a pair of chromosomes, i.e., replicate loci. Libraries produced from such cells may contain donor DNA integrated at replicate fixed loci. For example libraries produced from diploid cells may have donor DNA integrated at duplicate fixed loci and libraries produced from triploid cells may have donor DNA integrated at triplicate fixed loci. Many suitable mammalian cells are diploid, and clones of mammalian cell libraries according to the invention may have donor DNA integrated at duplicate fixed loci.

[0112] The sequence recognised by the site-specific nuclease may occur at more than one independent locus in the cellular DNA. Donor DNA may therefore integrate at multiple independent loci. Libraries of diploid or polyploid cells may comprise donor DNA integrated at multiple independent fixed loci and/or at replicate fixed loci.

[0113] In cells containing recognition sequences at multiple loci (whether replicate or independent loci), each locus represents a potential integration site for a molecule of donor DNA. Introduction of donor DNA into the cells may result in integration at the full number of nuclease recognition sequences present in the cell, or the donor DNA may integrate at some but not all of these potential sites. For example, when producing a library from diploid cells containing recognition sequences at first and second fixed loci (e.g., duplicate fixed loci), the resulting library may comprise clones in which donor DNA is integrated at the first fixed locus, clones in which donor DNA is integrated at the second fixed locus, and clones in which donor DNA is integrated at both the first and second fixed loci.

[0114] Methods of producing libraries may therefore involve site-specific nuclease cleavage of multiple fixed loci in a cell, and integration of donor DNA at the multiple fixed loci. As noted above, in cases where there are multiple copies of the same recognition sequence (e.g., as occurs when targeting endogenous loci in diploid or polyploid cells) it is possible that two binder genes will be integrated, particularly when an efficient targeting mechanisms is used, with only one gene being specific to the target. This can be resolved during subsequent screening once binder genes have been isolated.

[0115] In some instances it may be desirable to introduce more than one binder per cell. For example bi-specific binders could be generated from two different antibodies coming together and these may have properties absent in the individual binders [47]. This could be achieved by introducing different antibody genes into both alleles at duplicate fixed loci or by targeting different antibody populations into independent fixed loci using the methods described herein. Furthermore a binder may itself be composed of multiple chains (e.g., antibody VH and VL domains presented within a Fab or IgG format). In this case it may be desirable to integrate the different sub-units into different loci. These could be integrated within the same cycle of nuclease-directed integration, they could be integrated sequentially using nuclease-directed integration for one or both integration steps.

### Landing Pad Sequence

[0116] In step a) of the method for identifying a locus, a landing pad sequence is provided. As used herein, a “landing pad sequence” may be understood to refer to a nucleotide sequence directing the integration or “landing” of a donor DNA molecule at a specific genomic locus. A landing pad sequence generally comprises a nucleotide sequence recognized by a site-specific recombinase or site-specific nuclease (“recognition sequence”) allowing site-specific recombinase-directed or nuclease-directed integration of a donor DNA molecule comprising one or more transgenes of interest, for example a transgene encoding a binder or a selectable marker as described later herein. In embodiments, the landing pad sequence comprises a recognition sequence for a site-specific nuclease. Preferred recognition sequences are defined elsewhere herein.

[0117] Optionally, a landing pad sequence may comprise additional nucleotide sequences which facilitate screening and/or selection of clones having integrated the landing pad sequence into their genome, such as a selectable marker like a gene conferring resistance to an antibiotic. A landing pad sequence may optionally further comprise nucleotide sequences which facilitate the screening and/or selection of clones having integrated a donor DNA sequence into the landing pad sequence, such as a promoter or other regulatory region. As a non-limiting example, a promoter flanking a site-specific nuclease recognition site in a landing pad sequence may be operably linked to a promoterless transgene of interest following genomic integration of the transgene after cellular DNA cleavage by the site-specific nuclease. The resulting transgene expression may then be used for screening and/or selection purposes.

Selection of Clones with Integrated Landing Pad Sequence

[0118] Step d) of the method for identifying a locus involves selecting a clone having a landing pad sequence integrated into its genome. In cases wherein the landing pad sequence comprises a selectable marker like a gene conferring resistance to an antibiotic (such as blasticidin or puromycin), clones may be selected via culturing the cells in the presence of the antibiotic. Alternatively, clones may be screened and/or selected using standard molecular toolbox methods in the art, such as Southern Blotting or PCR. The selection of clones may comprise screening the clones. For example, inverted PCR (iPCR), as described in Schuldiner et al. (2018) Dev Cell 14:227-238 (incorporated herein by reference in its entirety) may be used for mapping the insertion site of transposable elements. Alternatively, splinkerette PCR (spPCR), as described in Potter and Luo (2010) PLOS ONE 5 (4): e1016 (incorporated herein by reference in its entirety) may be used. Splinkerette PCR involves the digestion of genomic DNA to yield overhanding sticky ends. The restriction enzyme is not required to cut within the landing pad sequence. Onto the sticky end is ligated a double stranded oligonucleotide (the splinkerette) that is unphosphorylated and contains a stable hairpin loop and compatible sticky end. Two rounds of nested PCR are then performed to amplify the genomic sequence between the transposon insertion site and the anneal splinkerette. This is followed by sequencing of the PCR products, using for example Sanger sequencing with another nested primer, or any other nucleic acid sequencing method known to the skilled person. Examples include Sanger sequencing, single-molecule real-time sequencing, ion torrent sequencing, pyrosequencing, Illumina-sequencing, combinatorial probe anchor synthesis, sequencing by ligation (SOLID sequencing), Nanopore sequencing, GenapSys sequencing, and the like. Sequencing sample preparation, instruments, and protocols are discussed in standard handbooks like Head, Ordoukhanian and Salomon (Eds), Next Generation Sequencing: Methods and Protocols, Humana Press, NJ, USA (2018), incorporated herein by reference in its entirety, with many being commercially available, e.g. from Illumina (CA, USA), Pacific Biosciences (CA, USA), and others. Using the above described screening and/or selection methods, clones having only a single copy of the transposon element, and thereby the landing pad sequence, integrated into their genome may be selected. Alternatively, screening for single-copy integration may be performed using whole-genome-sequencing (WGS) followed by genome assembly using standard bioinformatics tools available in the art. Alternatively, screening for single-copy integration may be performed by quantification of the expression of a transgene of interest following its integration into the landing pad sequence. Expression may be evaluated on the level of mRNA or protein by standard assays known to the person of skill in the art (e.g. qPCR, Western blotting, ELISA). Expression may be also evaluated using spectroscopic methods such as fluorescence-activated cell sorting (FACS) using commercially available devices. As a non-limiting example, a transgene encoding for a cell membrane-bound binder may be integrated into the landing pad following integration of the landing pad into the cellular DNA. Fluorescent-labelled antibodies against the binder can then be used in conjunction with FACS to quantify expression levels and select clones with single-copy integration of the binder. An example of FACS-based single-copy integration screening and selection is further provided in the experimental section herein.

[0119] These clones are particularly useful, as they can be used for the construction of libraries characterized by a uniform integration and/or uniform transcription of binders, as elsewhere described herein. In embodiments, a method for identifying a locus comprises the further steps of (e) screening for single-copy integration (of the landing pad sequence) and (f) identifying the locus (at which the landing pad sequence was integrated). Step (f) may be performed by any of the sequencing methods described above.

### Locus and Use

[0120] A “locus” in the context of a method for identifying a locus in a genome of a eukaryotic cell refers to a genomic locus which is a candidate for insertion of binder sequences. Hence, a locus identified via such a method may be used to build a library according to the invention by integrating a donor DNA sequence comprising one or more transgenes encoding a binder at the locus. Preferably, in such a use, the donor DNA is integrated at a landing pad sequence at the locus.

[0121] In a preferred embodiment, a use of a locus according to the invention comprises:
[0122] identifying a locus via a method for identifying a locus according to the invention;
[0123] providing donor DNA molecules encoding the binders, and eukaryotic cells;
[0124] introducing the donor DNA into the cells and providing a site-specific nuclease within the cells, wherein the nuclease cleaves a recognition sequence in cellular DNA, wherein the recognition sequence is at said locus, to create an integration site at which the donor DNA becomes integrated into the cellular DNA, integration occurring through DNA repair mechanisms endogenous to the cells, thereby creating recombinant cells containing donor DNA integrated in the cellular DNA; and
[0125] culturing the recombinant cells to produce clones, thereby providing a library of eukaryotic cell clones containing donor DNA encoding the repertoire of binders.

[0126] All preferred embodiments in the context of a method for producing a library according to the invention apply mutatis mutandis to a method according to this preferred embodiment.

### Donor DNA

[0127] A method for generating a library, and preferably also a method for identifying a locus, comprises integrating a donor DNA. A preferred donor DNA is described in this section.

[0128] The donor DNA will usually be circularised DNA, and may be provided as a plasmid or vector. Linear DNA is another possibility. Donor DNA molecules may comprise regions that do not integrate into the cellular DNA, in addition to one or more donor DNA sequences that integrate into the cellular DNA. The DNA is typically double-stranded, although single-stranded DNA may be used in some cases. The donor DNA contains one or more transgenes encoding a binder, for example it may comprise a promoter: gene cassette. In the simplest format double-stranded, circular plasmid DNA can be used to drive homologous recombination. This requires regions of DNA flanking the transgenes which are homologous to DNA sequence flanking the cleavage site in genomic DNA. Linearised double-stranded plasmid DNA or PCR product or synthetic genes could be used to drive both homologous recombination and NHEJ repair pathways. As an alternative to double-stranded DNA it is possible to use single-stranded DNA to drive homologous recombination [52]. A common approach to generating single-stranded DNA is to include a single-stranded origin of replication from a filamentous bacteriophage into the plasmid. Single-stranded DNA viruses such as adeno-associated virus (AAV) have been used to drive efficient homologous recombination where the efficiency has been shown to be improved by several orders of magnitude [53, 54]. Systems such as the AAV systems could be used in conjunction with nuclease-directed cleavage in a method for identifying a locus and in a method for generating a library. The benefits of both systems could be applied to in a method for identifying a locus and in a method for generating a library. The packaging limit of AAV vectors is 4.7 kb but the use of nuclease digestion of target genomic DNA will reduce this allowing larger transgene constructs to be incorporated.

[0129] A molecule of donor DNA may encode a single binder or multiple binders. Optionally, multiple subunits of a binder may be encoded per molecule of donor DNA. In some embodiments, donor DNA encodes a subunit of a multimeric binder.

[0130] In embodiments, a method for identifying a locus according to the invention comprises the additional steps of (g) integrating a donor DNA sequence comprising one or more transgenes encoding a binder at the landing pad sequence and (h) screening for integration of the donor DNA. In more embodiments, step (g) comprises providing a site-specific nuclease within the cells, wherein the nuclease cleaves the recognition sequence comprised in the landing pad. In more preferred embodiments, step (h) comprises screening for display of the one or more binders encoded by the donor DNA.

Promoters in Donor DNA and Selection of Clones with Integrated Donor DNA

[0131] In a method for identifying a locus and in a method for generating a library, the donor DNA comprises one or more transgenes encoding a binder. Transcription of the binder from the encoding donor DNA will usually be achieved by placing the sequence encoding the binder under control of a promoter and optionally one or more enhancer elements for transcription. A promoter (and optionally other genetic control elements) may be included in the donor DNA molecule itself. Alternatively, the sequence encoding the binder may lack a promoter on the donor DNA, and instead may be placed in operable linkage with a promoter on the cellular DNA, e.g., an endogenous promoter or a pre-integrated exogenous promoter, as a result of its insertion at the integration site created by the site-specific nuclease.

[0132] Donor DNA may further comprise one or more further coding sequences, such as genetic elements enabling selection of cells containing or expressing the donor DNA. Such an element may be called a selectable marker. As with the sequence encoding the binder, discussed above, such elements may be associated with a promoter on the donor DNA or may be placed under control of a promoter as a result of integration of the donor DNA at a fixed locus. The latter arrangement provides a convenient means of selecting specifically for those cells which have integrated the donor DNA at the desired site, since these cells should express the genetic element for selection. This may be, for example, a gene conferring resistance to a negative selection agent such as blasticidin or puromycin. One or more selection steps may be applied to remove unwanted cells, such as cells that lack the donor DNA or which have not integrated the donor DNA at the correct position.

[0133] The expression of a membrane anchored binder could itself be used as a form of selectable marker. For example if a library of antibody genes, formatted as IgG or scFv-Fc fusions are introduced, then cells which express the antibody can be selected using secondary reagents which recognise the surface expressed Fc using methods described herein. Upon initial transfection with donor DNA encoding the transgene under the control of an exogenous promoter, transient expression (and cell surface expression) of the binder will occur and it will be necessary to wait for transient expression to abate (to achieve targeted integration of e.g., 1-2 antibody genes/cell).

[0134] As an alternative a construct encoding a membrane tethering element (e.g., the Fc domain of the present example fused to the PDGF receptor transmembrane domain) could be pre-integrated before the binders sequences are introduced. If this membrane-tethering element lacks a promoter or is encoded within an exon which is out of frame with the preceding exon then surface expression will be compromised. Targeted integration of an incoming donor molecule can then correct this defect (e.g., by targeting a promoter or an “in-frame” exon into the intron which is upstream of the defective tethering element). If the frame “correcting exon” also encodes a binder then a fusion will be produced between the binder and the membrane tethering element resulting in surface expression of both. Thus correctly targeted integration will result in-frame expression of the membrane tethering element alone or as part of a fusion with the incoming binder. Furthermore if the incoming library of binders lack a membrane tethering element and these are incorrectly integrated they will not be selected. Thus expression of the binder itself on the cell surface can be used to select the population of cells with correctly targeted integration.

### Number of Clones and Library Diversity

[0135] A locus identified via a method for identifying a locus may be used for building a library of eukaryotic cell clones containing DNA encoding a diverse repertoire of binders. Likewise, a method for generating a library is for generating a library of eukaryotic cell clones containing DNA encoding a diverse repertoire of binders. In the context of this application, a library refers to a library of eukaryotic cell clones containing DNA encoding a diverse repertoire of binders which may be obtained via one of these methods, unless explicitly mentioned otherwise. Preferred libraries and their properties are defined in this section.

[0136] Yeast display libraries of 107-1010 have previously been constructed and demonstrated to yield binders in the absence of immunisation or pre-selection of the population [9, 55, 56, 57]. Many of the previously published mammalian display libraries used antibody genes derived from immunised donors or even enriched antigen-specific B lymphocytes, given the limitations of library size and variability when using cells from higher eukaryotes. Thanks to the efficiency of gene targeting in the methods of the current invention large, naive libraries can be constructed in higher eukaryotes such as mammalian cells, which match those described for simpler eukaryotes such as yeast.

[0137] Following integration of donor DNA into the cellular DNA, the resulting recombinant cells are cultured to allow their replication, generating a clone of cells from each initially-produced recombinant cell. Each clone is thus derived from one original cell into which donor DNA was integrated at an integration site created by the site-specific nuclease. Methods according to the present invention are associated with a high efficiency and high fidelity of donor DNA integration, and a library according to the present invention may contain at least 100, 10³, 10⁴, 10⁵, 10⁶, 10⁷,

10⁸, 10⁹ or 10¹⁰ clones.

[0138] Without being bound to this theory, using nuclease-directed integration it is possible to target 10% or more of transfected mammalian cells. It is also practical to grow and transform >10¹⁰ cells (e.g. from 5 litres of cells growing at 2×10⁶ cells/ml). Transfection of such large numbers of cells could be done using standard methods including polyethyleneimine—mediated transfection as described herein. In addition methods are available for highly efficient electroporation of 10¹⁰ cells in 5 minutes e.g. http://www.maxcyte.com. Thus using the approach of the present invention it is possible to create libraries in excess of 109 clones. When the population of donor DNA molecules that is used to create the library contains multiple copies of the same sequence, two or more clones may be obtained that contain DNA encoding the same binder. It can also be the case that a clone may contain donor DNA encoding more than one different binder, for example if there is more than one recognition sequence for the site-specific nuclease, as detailed elsewhere herein. Thus, the diversity of the library, in terms of the number of different binders encoded or expressed, may be different from the number of clones obtained.

[0139] Clones in the library preferably contain donor DNA encoding one or two members of the repertoire of binders and/or preferably express only one or two members of the repertoire of binders. A limited number of different binders per cell is an advantage when it comes to identifying the clone and/or DNA encoding a particular binder identified when screening the library against a given target. This is simplest when clones encode a single member of the repertoire of binders. However it is also straightforward to identify the relevant encoding DNA for a desired binder if a clone selected from a library encodes a small number of different binders, for example a clone may encode two members of the repertoire of binders. As discussed elsewhere herein, clones encoding one or two binders are particularly convenient to generate by selecting a recognition sequence for the site-specific nuclease that occurs once per chromosomal copy in a diploid genome, as diploid cells contain duplicate fixed loci, one on each chromosomal copy, and the donor DNA may integrate at one or both fixed loci. Thus, clones of the library may each express only one or two members of the repertoire of binders.

[0140] Binders displayed on the surface of cells of the library may be identical to (having the same amino acid sequence as) other binders displayed on the same cell. The library may consist of clones of cells which each display a single member of the repertoire of binders, or of clones displaying a plurality of members of the repertoire of binders per cell. Alternatively a library may comprise some clones that display a single member of the repertoire of binders, and some clones that display a plurality of members (e.g., two) of the repertoire of binders.

[0141] Accordingly, a library according to the present invention may comprise clones encoding more than one member of the repertoire of binders, wherein the donor DNA is integrated at duplicate fixed loci or multiple independent fixed loci.

[0142] As noted above, it is easiest to identify the corresponding encoding DNA for a binder if the corresponding clone expresses only one binder. Typically, a molecule of donor DNA will encode a single binder. The binder may be multimeric so that a molecule of donor DNA includes multiple genes or open reading frames corresponding to the various subunits of the multimeric binder.

[0143] A library according to the present invention may encode at least 100, 10³, 10⁴, 10⁵ or 10⁶, 10⁷, 10⁸, 10⁹ or 10¹⁰ different binders. Where the binders are multimeric, diversity may be provided by one or more subunits of the binder. Multimeric binders may combine one or more variable subunits with one or more constant subunits, where the constant subunits are the same (or of more limited diversity) across all clones of the library. In generating libraries of multimeric binders, combinatorial diversity is possible where a first repertoire of binder subunits may pair with any of a second repertoire of binder subunits.

### Characteristics and Form of the Library

[0144] Methods according to the invention enable construction of eukaryotic cell libraries having many advantageous characteristics. The libraries preferably have any one or more of the following features:
[0145] 1. Diversity. A library may encode and/or express at least 100, 10³, 10⁴, 10⁵, 10⁶, 10⁷, 10⁸ or 10⁹ different binders.
[0146] 2. Uniform integration. A library may consist of clones containing donor DNA integrated at a fixed locus, or at a limited number of fixed loci in the cellular DNA. Each clone in the library therefore contains donor DNA at the fixed locus or at least one of the fixed loci. Preferably clones contain donor DNA integrated at one or two fixed loci in the cellular DNA. As explained elsewhere herein, the integration site is at a recognition sequence for a site-specific nuclease. Integration of donor DNA to produce recombinant DNA is described in detail elsewhere herein and can generate different results depending on the number of integration sites. Where there is a single potential integration site in cells used to generate the library, the library will be a library of clones containing donor DNA integrated at the single fixed locus. All clones of the library therefore contain the binder genes at the same position in the cellular DNA. Alternatively where there are multiple potential integration sites, the library may be a library of clones containing donor DNA integrated at multiple and/or different fixed loci. Preferably, each clone of a library contains donor DNA integrated at a first and/or a second fixed locus. For example a library may comprise clones in which donor DNA is integrated at a first fixed locus, clones in which donor DNA is integrated at a second fixed locus, and clones in which donor DNA is integrated at both the first and second fixed loci. In preferred embodiments there are only one or two fixed loci in the clones in a library, although it is possible to integrate donor DNA at multiple loci if desired for particular applications. Therefore in some libraries each clone may contain donor DNA integrated at any one or more of several fixed loci, e.g., three, four, five or six fixed loci. For libraries containing binder subunits integrated at separate sites, clones of the library may contain DNA encoding a first binder subunit integrated at a first fixed locus and DNA encoding a second binder subunit integrated at a second fixed locus, wherein the clones express multimeric binders comprising the first and second subunits.
[0147] 3. Uniform transcription. Relative levels of transcription of the binders between different clones of the library is kept within controlled limits due to donor DNA being integrated at a controlled number of loci, and at the same locus in the different clones (fixed locus). Relatively uniform transcription of binder genes leads to comparable levels of expression of binders on or from clones in a library. Binders displayed on the surface of cells of the library may be identical to (having the same amino acid sequence as) other binders displayed on the same cell. The library may consist of clones of cells which each display a single member of the repertoire of binders, or of clones displaying a plurality of members of the repertoire of binders per cell. Alternatively a library may comprise some clones that display a single member of the repertoire of binders, and some clones that display a plurality of members (e.g., two) of the repertoire of binders. Preferably clones of a library express one or two members of the repertoire of binders. For example, a library of eukaryotic cell clones according to the present invention may express a repertoire of at least 10³, 10⁴, 10⁵ 10⁶, 10⁷, 10⁸ or 10⁹ different binders, e.g., IgG, Fab, scFv or scFv-Fc antibody fragments, each cell containing donor DNA integrated at a fixed locus in the cellular DNA. The donor DNA encodes the binder and may further comprise a genetic element for selection of cells into which the donor DNA is integrated at the fixed locus. Cells of the library may contain DNA encoding an exogenous site-specific nuclease.

[0148] These and other features of libraries are further described elsewhere herein.

[0149] The present invention extends to the library either in pure form, as a population of library clones in the absence of other eukaryotic cells, or mixed with other eukaryotic cells. Other cells may be eukaryotic cells of the same type (e.g., the same cell line) or different cells. Further advantages may be obtained by combining two or more libraries according to the present invention, or combining a library according to the invention with a second library or second population of cells, either to facilitate or broaden screening or for other uses as are described herein or which will be apparent to the skilled person.

[0150] A library according to the invention, one or more clones obtained from the library, or host cells into which DNA encoding a binder from the library has been introduced, may be provided in a cell culture medium. The cells may be cultured and then concentrated to form a cell pellet for convenient transport or storage.

[0151] Libraries will usually be provided in vitro. The library may be in a container such as a cell culture flask containing cells of the library suspended in a culture medium, or a container comprising a pellet or concentrated suspension of eukaryotic cells comprising the library. The library may constitute at least 75%, 80%, 85% or 90% of the eukaryotic cells in the container.

[0152] It is understood that the fixed locus where the donor DNA is integrated for the libraries of the invention corresponds with the location of the recognition sequence of methods for generating a library according to the invention. Thus, all preferences for the location of the recognition sequences as described herein are also applicable to the fixed locus of the library of the invention.

### Binders

[0153] A “binder” in accordance with the present invention is a binding molecule, representing a specific binding partner for another molecule. Typical examples of specific binding partners are antibody-antigen and receptor-ligand.

[0154] The repertoire of binders encoded by a library will usually share a common structure and have one or more regions of diversity. The library therefore enables selection of a member of a desired structural class of molecules, such as a peptide or a scFv antibody molecule. For example, the binders may be polypeptides sharing a common structure and having one or more regions of amino acid sequence diversity.

[0155] This can be illustrated by considering a repertoire of antibody molecules. These may be antibody molecules of a common structural class, e.g., IgG, Fab, scFv-Fc or scFv, differing in one or more regions of their sequence. Antibody molecules typically have sequence variability in their complementarity determining regions (CDRs), which are the regions primarily involved in antigen recognition. A repertoire of binders in the present invention may be a repertoire of antibody molecules which differ in one or more CDRs, for example there may be sequence diversity in all six CDRs, or in one or more particular CDRs such as the heavy chain CDR3 and/or light chain CDR3.

[0156] Antibody molecules and other binders are described in more detail elsewhere herein. The potential of the present invention however extends beyond antibody display to include display of libraries of peptides or engineered proteins, including receptors, ligands, individual protein domains and alternative protein scaffolds [58, 59]. Nuclease-directed site-specific integration can be used to make libraries of other types of binders previously engineered using other display systems. Many of these involve monomeric binding domains such as DARPins and lipocalins, affibodies and adhirons [58, 59, 152]. Display on eukaryotes, particularly mammalian cells, also opens up the possibility of isolating and engineering binders or targets involving more complex, multimeric targets. For example T cell receptors (TCRs) are expressed on T cells and have evolved to recognise peptide presented in complex with MHC molecules on antigen presenting cells. Libraries encoding and expressing a repertoire of TCRs may be generated, and may be screened to identify binding to MHC peptide complexes as further described elsewhere herein.

[0157] For multimeric binders, donor DNA encoding the binder may be provided as one or more DNA molecules. For example, where individual antibody VH and VL domains are to be separately expressed, these may be encoded on separate molecules of donor DNA. The donor DNA integrates into the cellular DNA at multiple integration sites, e.g., the binder gene for the VH at one locus and the binder gene for the VL at a second locus. Methods of introducing donor DNA encoding separate binder subunits are described in more detail elsewhere herein. Alternatively, both subunits or parts of a multimeric binder may be encoded on the same molecule of donor DNA which integrates at a fixed locus.

[0158] A binder may be an antibody molecule or a non-antibody protein that comprises an antigen-binding site. An antigen binding site may be provided by means of arrangement of peptide loops on non-antibody protein scaffolds such as fibronectin or cytochrome B etc., or by randomising or mutating amino acid residues of a loop within a protein scaffold to confer binding to a desired target [60, 61, 62]. Protein scaffolds for antibody mimics are disclosed in WO/0034784 in which proteins (antibody mimics) are described that include a fibronectin type III domain having at least one randomised loop. A suitable scaffold into which to graft one or more peptide loops, e.g., a set of antibody VH CDR loops, may be provided by any domain member of the immunoglobulin gene superfamily. The scaffold may be a human or non-human protein.

[0159] Use of antigen binding sites in non-antibody protein scaffolds has been reviewed previously [63]. Typical are proteins having a stable backbone and one or more variable loops, in which the amino acid sequence of the loop or loops is specifically or randomly mutated to create an antigen-binding site having for binding the target antigen. Such proteins include the IgG-binding domains of protein A from S. aureus, transferrin, tetranectin, fibronectin (e.g. 10th fibronectin type III domain) and lipocalins. Other approaches include small constrained peptide e.g., based on “knottin” and cyclotides scaffolds [64]. Given their small size and complexity particularly in relation to correct formation of disulphide bond, there may be advantages to the use of eukaryotic cells for the selection of novel binders based on these scaffolds. Given the common functions of these peptides in nature, libraries of binders based on these scaffolds may be advantageous in generating small high affinity binders with particular application in blocking ion channels and proteases. In addition to antibody sequences and/or an antigen-binding site, a binder may comprise other amino acids, e.g., forming a peptide or polypeptide, such as a folded domain, or to impart to the molecule another functional characteristic in addition to ability to bind antigen. A binder may carry a detectable label, or may be conjugated to a toxin or a targeting moiety or enzyme (e.g., via a peptidyl bond or linker). For example, a binder may comprise a catalytic site (e.g., in an enzyme domain) as well as an antigen binding site, wherein the antigen binding site binds to the antigen and thus targets the catalytic site to the antigen. The catalytic site may inhibit biological function of the antigen, e.g., by cleavage.

### Antibody Molecules

[0160] Antibody molecules are preferred binders. Antibody molecules may be whole antibodies or immunoglobulins (Ig), which have four polypeptide chains-two identical heavy chains and two identical light chains. The heavy and light chains form pairs, each having a VH-VL domain pair that contains an antigen binding site. The heavy and light chains also comprise constant regions: light chain CL, and heavy chain CH1, CH2, CH3 and sometimes CH4 (the fifth domain CH4 is present in human IgM and IgE). The two heavy chains are joined by disulphide bridges at a flexible hinge region. An antibody molecule may comprise a VH and/or a VL domain.

[0161] The most common native format of an antibody molecule is an IgG which is a heterotetramer consisting of two identical heavy chains and two identical light chains. The heavy and light chains are made up of modular domains with a conserved secondary structure consisting of a four-stranded antiparallel beta-sheet and a three-stranded anti-parallel beta-sheet, stabilised by a single disulphide bond. Antibody heavy chains each have an N terminal variable domain (VH) and 3 relatively conserved “constant” immunoglobulin domains (CH1, CH2, CH3) while the light chains have one N terminal variable domain (VL) and one constant domains (CL). Disulphide bonds stabilise individual domains and form covalent linkages to join the four chains in a stable complex. The VL and CL of the light chain associates with VH and CH1 of the heavy chain and these elements can be expressed alone to form a Fab fragment. The CH2 and CH3 domains (also called the “Fc domain”) associate with another CH2: CH3 pair to give a tetrameric Y shaped molecule with the variable domains from the heavy and light chains at the tips of the “Y”. The CH2 and CH3 domains are responsible for the interactions with effector cells and complement components within the immune system. Recombinant antibodies have previously been expressed in IgG format or as Fabs (consisting of a dimer of VH: CH1 and a light chain). In addition the artificial construct called a single chain Fv (scFv) could be used consisting of DNA encoding VH and VL fragments fused genetically with DNA encoding a flexible linker.

[0162] Binders may be human antibody molecules. Thus, where constant domains are present these are preferably human constant domains.

[0163] Binders may be antibody fragments or smaller antibody molecule formats, such as single chain antibody molecules. For example, the antibody molecules may be scFv molecules, consisting of a VH domain and a VL domain joined by a linker peptide. In the scFv molecule, the VH and VL domains form a VH-VL pair in which the complementarity determining regions of the VH and VL come together to form an antigen binding site.

[0164] Other antibody fragments that comprise an antibody antigen-binding site include, but are not limited to, (i) the Fab fragment consisting of VL, VH, CL and CH1 domains; (ii) the Fd fragment consisting of the VH and CH1 domains; (iii) the Fv fragment consisting of the VL and VH domains of a single antibody; (iv) the dAb fragment [65, 66, 67], which consists of a VH or a VL domain; (v) isolated CDR regions; (vi) F(ab′)2 fragments, a bivalent fragment comprising two linked Fab fragments (vii) scFv, wherein a VH domain and a VL domain are linked by a peptide linker which allows the two domains to associate to form an antigen binding site [68, 69]; (viii) bispecific single chain Fv dimers (PCT/US92/09965) and (ix) “diabodies”, multivalent or multispecific fragments constructed by gene fusion (WO94/13804; [70]). Fv, scFv or diabody molecules may be stabilised by the incorporation of disulphide bridges linking the VH and VL domains [71].

[0165] Various other antibody molecules including one or more antibody antigen-binding sites have been engineered, including for example Fab2, Fab3, diabodies, triabodies, tetrabodies and minibodies (small immune proteins). Antibody molecules and methods for their construction and use have been described [72].

[0166] Other examples of binding fragments are Fab′, which differs from Fab fragments by the addition of a few residues at the carboxyl terminus of the heavy chain CH1 domain, including one or more cysteines from the antibody hinge region, and Fab′-SH, which is a Fab′ fragment in which the cysteine residue(s) of the constant domains bear a free thiol group.

[0167] A dAb (domain antibody) is a small monomeric antigen-binding fragment of an antibody, namely the variable region of an antibody heavy or light chain. VH dAbs occur naturally in camelids (e.g., camel, llama) and may be produced by immunizing a camelid with a target antigen, isolating antigen-specific B cells and directly cloning dAb genes from individual B cells. dAbs are also producible in cell culture. Their small size, good solubility and temperature stability makes them particularly physiologically useful and suitable for selection and affinity maturation. Camelid VH dAbs are being developed for therapeutic use under the name “nanobodies TM”.

[0168] Synthetic antibody molecules may be created by expression from genes generated by means of oligonucleotides synthesized and assembled within suitable expression vectors, for example as described by Knappik et al. or Krebs et al. [74].

[0169] Bispecific or bifunctional antibodies form a second generation of monoclonal antibodies in which two different variable regions are combined in the same molecule [75]. Their use has been demonstrated both in the diagnostic field and in the therapy field from their capacity to recruit new effector functions or to target several molecules on the surface of tumour cells. Where bispecific antibodies are to be used, these may be conventional bispecific antibodies, which can be manufactured in a variety of ways [76], e.g., prepared chemically or from hybrid hybridomas, or may be any of the bispecific antibody fragments mentioned above. These antibodies can be obtained by chemical methods [77, 78] or somatic methods [79, 80] but likewise and preferentially by genetic engineering techniques which allow the heterodimerisation to be forced and thus facilitate the process of purification of the antibody sought [81]. Examples of bispecific antibodies include those of the BiTETM technology in which the binding domains of two antibodies with different specificity can be used and directly linked via short flexible peptides. This combines two antibodies on a short single polypeptide chain. Diabodies and scFv can be constructed without an Fc region, using only variable domains, potentially reducing the effects of anti-idiotypic reaction.

[0170] Bispecific antibodies can be constructed as entire IgG, as bispecific Fab′2, as Fab′PEG, as diabodies or else as bispecific scFv. Further, two bispecific antibodies can be linked using routine methods known in the art to form tetravalent antibodies.

[0171] Bispecific diabodies, as opposed to bispecific whole antibodies, may also be particularly useful. Diabodies (and many other polypeptides, such as antibody fragments) of appropriate binding specificities can be readily selected. If one arm of the diabody is to be kept constant, for instance, with a specificity directed against an antigen of interest, then a library can be made where the other arm is varied and an antibody of appropriate specificity selected. Bispecific whole antibodies may be made by alternative engineering methods as described in Ridgeway et al., 1996 [82].

[0172] A library according to the invention may be used to select an antibody molecule that binds one or more antigens of interest. Selection from libraries is described in detail below. Following selection, the antibody molecule may then be engineered into a different format and/or to contain additional features. For example, the selected antibody molecule may be converted to a different format, such as one of the antibody formats described above. The selected antibody molecules, and antibody molecules comprising the VH and/or VL CDRs of the selected antibody molecules, are an aspect of the present invention. Antibody molecules and their encoding nucleic acid may be provided in isolated form.

[0173] Antibody fragments can be obtained starting from an antibody molecule by methods such as digestion by enzymes e.g. pepsin or papain and/or by cleavage of the disulphide bridges by chemical reduction. In another manner, the antibody fragments can be obtained by techniques of genetic recombination well known to the person skilled in the art or else by peptide synthesis by means of, for example, automatic peptide synthesisers, or by nucleic acid synthesis and expression.

[0174] It is possible to take monoclonal and other antibodies and use techniques of recombinant DNA technology to produce other antibodies or chimaeric molecules that bind the target antigen. Such techniques may involve introducing DNA encoding the immunoglobulin variable region, or the CDRs, of an antibody to the constant regions, or constant regions plus framework regions, of a different immunoglobulin. See, for instance, EP-A-184187, GB 2188638A or EP-A-239400, and a large body of subsequent literature.

[0175] Antibody molecules may be selected from a library and then modified, for example the in vivo half-life of an antibody molecule can be increased by chemical modification, for example PEGylation, or by incorporation in a liposome.

### Sources of Binder Genes

[0176] The traditional route for generation of monoclonal antibodies utilises the immune system of laboratory animals like mice and rabbits to generate a pool of high affinity antibodies which are then isolated by the use of hybridoma technology. The libraries of the present invention provides an alternative route to identifying antibodies arising from immunisation. VH and VL genes could be amplified from the B cells of immunised animals and cloned into an appropriate vector for introduction into eukaryotic libraries followed by selection from these libraries. Phage display and ribosome display allows very large libraries (>109 clones) to be constructed enabling isolation of human antibodies without immunisation. Producing libraries according to the present invention could also be used in conjunction with such methods. Following rounds of phage display selection, the selected population of binders could be introduced into eukaryotic cells by nuclease-directed integration as described herein. This would allow the initial use of very large libraries based in other systems (e.g., phage display) to enrich a population of binders while allowing their efficient screening using eukaryotic cells as described above. Thus the invention can combine the best features of both phage display and eukaryotic display to give a high throughput system with quantitative screening and sorting.

[0177] Using phage display and yeast display it has previously been demonstrated that it is also possible to generate binders without resorting to immunisation, provided display libraries of sufficient size are used. For example multiple binders were generated from a non-immune antibody library of >107 clones [83]. This in turn allows generation of binders to targets which are difficult by traditional immunisation routes e.g., generation of antibodies to “self-antigens” or epitopes which are conserved between species. For example, human/mouse cross-reactive binders can be enriched by sequential selection on human and then mouse versions of the same target. Since it is not possible to specifically immunise humans to most targets of interest, this facility is particularly important in allowing the generation of human antibodies which are preferred for therapeutic approaches.

[0178] In examples of mammalian display to date, where library sizes and quality were limited, binders have only been generated using repertoires which were pre-enriched for binders, e.g., from immunisation or from engineering of pre-existing binders. The ability to make large libraries in eukaryotic cells and particularly higher eukaryotes creates the possibility of isolating binders direct from these libraries starting with non-immune binders or binders which have not previously been selected within another system. By producing a library according to the present invention it is possible to generate binders from non-immune sources. This in turn opens up the possibilities for using binder genes from multiple sources. Binder genes could come from PCR of natural sources such as antibody genes. Binder genes could also be re-cloned from existing libraries, such as antibody phage display libraries, and cloned into a suitable donor vector for nuclease-directed integration into target cells. Binders may be completely or partially synthetic in origin. Furthermore various types of binders are described elsewhere herein, for example binder genes could encode antibodies or could encode alternative scaffolds [58, 59], peptides or engineered proteins or protein domains.

### Binder Display

[0179] A library built in the context of the invention may be cultured to express the binders in either soluble secreted form or in transmembrane form. It is said that the expressed binders are “displayed” if they are retained on the surface of the cells which encode them. In this context, terms like “binder display”, “display on/at the surface”, “display on the cell”, “display of the binder” and the like may be used interchangeably. In this context, a library may also be called a display or a display library.

[0180] Preferably, a library wherein the expressed binders are displayed is to provide a repertoire of binders for screening against a target of interest.

[0181] Binders may comprise or be linked to a membrane anchor, such as a transmembrane domain, for extracellular display of the binder at the cell surface. This may involve direct fusion of the binder to a membrane localisation signal such as a GPI recognition sequence or to a transmembrane domain such as the transmembrane domain of the PDGF receptor [84]. Retention of binders at the cell surface can also be done indirectly by association with another cell surface retained molecule expressed within the same cell. This associated molecule could itself be part of a heterodimeric binder, such as tethered antibody heavy chain in association with a light chain partner that is not directly tethered.

[0182] Although cell surface immobilisation facilitates selection of the binder, in many applications it is necessary to prepare cell-free, secreted binder. It will be possible to combine membrane tethering and soluble secretion using a recapture method of attaching the secreted binders to cell surface receptors. One approach is to format the library of binders as secreted molecules which can associate with a membrane anchored molecule expressed within the same cell which can function to capture a secreted binder. For example, in the case of antibodies or binder molecules fused to antibody Fc domains, a membrane tethered Fc can “sample” secreted binder molecules being expressed in the same cell resulting in display of a monomeric fraction of the binder molecules being expressed while the remainder is secreted in a bivalent form (U.S. Pat. No. 8,551,715). An alternative is to use a tethered IgG binding domain such as protein A.

[0183] Other methods for retaining secreted antibodies with the cells producing them are reviewed in Kumar et al. (2012) and include encapsulation of cells within microdrops, matrix aided capture, affinity capture surface display (ACSD), secretion and capture technology (SECANT) and “cold capture” [85]. In examples given for ACSD and SECANT [85], biotinylation is used to facilitate immobilisation of streptavidin or a capture antibody on the cell surface. The captured molecule in turn captures secreted antibodies. In the example of SECANT in vivo biotinylated of the secreted molecule occurs. Using the “cold capture” technique secreted antibody can be detected on producer cells using antibodies directed to the secreted molecule. It has been proposed that this due to association of the secreted antibody with the glycocalyx of the cell [86]. Alternatively it has been suggested that the secreted product is trapped by staining antibodies on the cell surface before being endocytosed [87]. The above methods have been used to identify high expressing clones within a population but could potentially be adapted for identification of binding specificity, provided the association has sufficient longevity at the cell surface.

[0184] Even when the binder is directly tethered to the cell surface it is possible to generate a soluble product. For example the gene encoding the selected binder can be recovered and cloned into an expression vector lacking the membrane anchored sequence. Alternatively, an expression construction can be used in which the transmembrane domain is encoded within an exon flanked by recombination sites, e.g., ROX recognition sites for Ore recombinase [88]. The exon encoding the transmembrane domain can be removed by transfection with a gene encoding Dre recombinase to switch expression to a secreted form.

[0185] Any of the above methods or other suitable approaches can be used to ensure that binders expressed by clones of a library are displayed on the surface of their expressing cells.

Display of scFvs on the Surface of Mammalian Cells Fused to Fc Domains

[0186] Although many antibody phage display libraries are formatted to display scFvs, eukaryotic display systems will allow presentation in Fab or IgG format. To take full advantage of the potential for IgG/Fab expression, particularly when using scFvs from other display systems will be necessary to take selected linked VH and VL domains within a bacterial expression system and express them within a eukaryotic system fused to appropriate constant domains. Described here is a method to convert scFv populations to immunoglobulin (Ig) or fragment, antigen binding (Fab) format in such a way that original VH and VL chain pairings are maintained. In the present invention, conversion is possible using individual clones, oligoclonal mixes or whole populations formatted as scFv while retaining the original pairing of VH and VLs chains. The method proceeds via the generation of an intermediate non-replicative “mini-circle” DNA which brings in a new “stuffer” DNA fragment. The circular DNA is linearised (e.g., by restriction digestion or PCR) which alters the relative position of the original VH and VL fragments and places the “stuffed” DNA between them. Following linearization the product can be cloned into a vector of choice, e.g., a mammalian expression vector. In this way all of the elements apart from the VH and VL can be replaced. Elements for bacterial expression can be replaced with elements for mammalian expression and fusion to alternative partners. The complete conversion process only requires a single transformation step of E. coli bacteria to generate a population of bacterial colonies each harbouring a plasmid encoding a unique Ig or Fab formatted recombinant antibody. Extending beyond conversion of scFv to IgG/Fab, the method can be employed to reformat any two joined DNA elements to clone into a vector such that after re-formatting each DNA element is surrounded by different DNA control features whilst maintaining the original pairing. A previous method has been described wherein 2 sequential cloning steps are used to replace these elements in contrast to the present method which proceeds via an intermediate non-replicative circular intermediate.

[0187] A method of restructuring a binder, or population of binders, may comprise converting scFv to Ig or a fragment thereof, e.g., Fab. The method may comprise converting nucleic acid encoding scFv to DNA encoding an immunoglobulin (Ig) or fragment thereof such as Fab format, in such a way that the original variable VH and VL chain pairings are maintained. Preferably the conversion proceeds via circular DNA intermediate which may be a non-replicative “mini-circle” DNA. The method requires a single transformation of E. coli for the direct generation of bacterial transformants harbouring plasmids encoding Ig or Fab DNA. The method may be used for monoclonal, oligoclonal or polyclonal clone reformatting. The method may be used to convert “en masse” an entire output population from any of the commonly used display technologies including phage, yeast or ribosome display.

[0188] More generally, this method allows the reformatting of any two joined DNA elements into a vector where the DNA elements are cloned under the control of separate promoters, or separated by alternative control elements, but maintaining the original DNA pairing.

[0189] Isolation, and optional restructuring, of DNA encoding binders may be followed by introduction of that DNA into further cells to create a derivative library as described elsewhere herein, or DNA encoding one or more particular binders of interest may be introduced into a host cell for expression. The host cell may be of a different type compared with the cells of the library from which it was obtained. Generally the DNA will be provided in a vector. DNA introduced into the host cell may integrate into cellular DNA of the host cell. Host cells expressing the secreted soluble antibody molecule can then be selected.

[0190] Host cells encoding one or more binders may be provided in culture medium and cultured to express the one or more binders.

### Derivative Libraries

[0191] Following a method for producing a library, one or more library clones may be selected and used to produce a further, second generation library. When a library has been generated by introducing DNA into eukaryotic cells as described herein, the library may be cultured to express the binders, and one or more clones expressing binders of interest may be recovered, for example by selecting binders against a target via a method for identifying a binder to a target. These clones may subsequently be used to generate a derivative library containing DNA encoding a second repertoire of binders, preferably via a method for producing a library.

[0192] To generate the derivative library, donor DNA of the one or more recovered clones is mutated to provide the second repertoire of binders. Mutations may be addition, substitution or deletion of one or more nucleotides. Where the binder is a polypeptide, mutation will be to change the sequence of the encoded binder by addition, substitution or deletion of one or more amino acids. Mutation may be focussed on one or more regions, such as one or more CDRs of an antibody molecule, providing a repertoire of binders of a common structural class which differ in one or more regions of diversity, as described elsewhere herein. Generating the derivative library may comprise isolating donor DNA from the one or more recovered clones, introducing mutation into the DNA to provide a derivative population of donor DNA molecules encoding a second repertoire of binders, and introducing the derivative population of donor DNA molecules into cells to create a derivative library of cells containing DNA encoding the second repertoire of binders.

[0193] Isolation of the donor DNA may involve obtaining and/or identifying the DNA from the clone. Such methods may encompass amplifying the DNA encoding a binder from a recovered clone, e.g., by PCR and introducing mutations. DNA may be sequenced and mutated DNA synthesised.

[0194] Mutation may alternatively be introduced into the donor DNA in the one or more recovered clones by inducing mutation of the DNA within the clones. The derivative library may thus be created from one or more clones without requiring isolation of the DNA, e.g., through endogenous mutation in avian DT40 cells. Antibody display lends itself especially well to the creation of derivative libraries. Once antibody genes are isolated, it is possible to use a variety of mutagenesis approaches (e.g., error prone PCR, oligonucleotide-directed mutagenesis, chain shuffling) to create display libraries of related clones from which improved variants can be selected. For example, with chain-shuffling the DNA encoding the population of selected VH clone, oligoclonal mix or population can be sub-cloned into a vector encoding a suitable antibody format and encoding a suitably formatted repertoire of VL chains [118]. Alternatively and again using the example of VHs, the VH clone, oligomix or population could be introduced into a population of eukaryotic cells which encode and express a population of appropriately formatted light chain partners (e.g., a VL-CL chain for association with an IgG or Fab formatted heavy chain). The VH population could arise from any of the sources discussed above including B cells of immunised animals or scFv genes from selected phage populations. In the latter example cloning of selected VHs into a repertoire of light chains could combine chain shuffling and re-formatting (e.g., into IgG format) in one step.

[0195] A particular advantage of display on eukaryotic cells is the ability to control the stringency of the selection/screening step. By reducing antigen concentration, cells expressing the highest affinity binders can be distinguished from lower affinity clones within the population. The visualisation and quantification of the affinity maturation process using flow cytometry is a major benefit of eukaryotic display as it gives an early indication of percentage positives in naive library and allows a direct comparison between the affinity of the selected clones and the parental population during sorting. Following sorting, the affinity of individual clones can be determined by pre-incubating with a range of antigen concentrations and analysis in flow cytometry or with a homogenous Time Resolved Fluorescence (TRF) assay or using surface plasmon resonance (SPR) (Biacore).

[0196] Screening to identify binders to a target of interestAs noted, the eukaryotic cell library may be used in a method of screening for a binder that recognises a target. Such a method may comprise:
[0197] providing a library via the method for producing a library of the invention, or providing a library via the use of a locus according to the invention, or providing a library according to the invention,
[0198] culturing cells of the library to express the binders,
[0199] exposing the binders to the target, allowing recognition of the target by one or more cognate binders, if present, and
[0200] detecting whether the target is recognised by a cognate binder.

[0201] A method according to this aspect may be called a method for identifying a binder to a target in the context of this application. In this context, the selection of binder or the screening for a binder also refer to such a method.

[0202] Methods for identifying a binder to a target may be carried out using a range of target molecule classes, e.g., protein, nucleic acid, carbohydrate, lipid, small molecules. The target may be provided in soluble form. The target may be labelled to facilitate detection, e.g., it may carry a fluorescent label or it may be biotinylated.

[0203] Cells expressing a target-specific binder may be isolated using a directly or indirectly labelled target molecule, where the binder captures the labelled molecule. For example, cells that are bound, via the binder: target interaction, to a fluorescently labelled target can be detected and sorted by flow cytometry or FACS to isolate the desired cells. Selections involving cytometry require target molecules which are directly fluorescently labelled or are labelled with molecules which can be detected with secondary reagents, e.g., biotinylated target can be added to cells and binding to the cell surface can be detected with fluorescently labelled streptavidin such as streptavidin-phycoerythrin. A further possibility is to immobilise the target molecule or secondary reagents which bind to the target on a solid surface, such as magnetic beads or agarose beads, to allow enrichment of cells which bind the target. For example cells that bind, via the binder: target interaction, to a biotinylated target can be isolated on a substrate coated with streptavidin, e.g., streptavidin-coated beads.

[0204] In libraries used in methods for identifying a binder to a target it is preferable to over-sample, i.e., screen more clones than the number of independent clones present within the library to ensure effective representation of the library. Identifying binders from very large libraries provided by the present invention could be done by flow sorting but this would take several days, particularly if over-sampling the library. As an alternative initial selections could be based on the use of recoverable antigen, e.g., biotinylated antigen recovered on streptavidin-coated magnetic beads. Thus streptavidin-coated magnetic beads could be used to capture cells which have bound to biotinylated antigen. Selection with magnetic beads could be used as the only selection method or this could be done in conjunction with flow cytometry where better resolution can be achieved, e.g., differentiating between a clone with higher expression levels and one with a higher affinity [56, 57].

[0205] The in vitro nature of display technology approaches makes it is possible to control selection in a way that is not possible by immunisation, e.g., selecting on a particular conformational state of a target [90, 91]. Targets could be tagged through chemical modification (fluorescein, biotin) or by genetic fusion (e.g. protein fused to an epitope tag such as a FLAG tag or another protein domain or a whole protein). The tag could be nucleic acid (e.g., DNA, RNA or non-biological nucleic acids) where the tag is part fused to target nucleic acid or could be chemically attached to another type of molecule such as a protein. This could be through chemical conjugation or through enzymatic attachment [92]. Nucleic acid could be also fused to a target through a translational process such as ribosome display. The “tag” may be another modification occurring within the cell (e.g., glycosylation, phosphorylation, ubiqitinylation, alkylation, PASylation, SUMO-lation and others described at the Post-translational Database (db-PTM) at http://dbptm.mbc.nctu.edu.tw/statistics.php) which can be detected via secondary reagents. This would yield binders which bind an unknown target protein on the basis of a particular modification.

[0206] Targets could be detected using existing binders which bind to that target molecule, e.g., target specific antibodies. Use of existing binders for detection will have the added advantage of identifying binders within the library of binders which recognise an epitope distinct from the binder used for detection. In this way pairs of binders could be identified for use in applications such as sandwich ELISA. Where possible a purified target molecule would be preferred. Alternatively the target may be displayed on the surface of a population of target cells and the binders are displayed on the surface of the library cells, the method comprising exposing the binders to the target by bringing the library cells into contact with the target cells. Recovery of the cells expressing the target (e.g., using biotinylated cells expressing target) will allow enrichment of cells which express binders to them. This approach would be useful where low affinity interactions are involved since there is the potential for a strong avidity effect.

[0207] The target molecule could also be unpurified recombinant or unpurified native targets provided a detection molecule is available to identify cell binding (as described above). In addition binding of target molecules to the cell expressing the binder could be detected indirectly through the association of target molecule to another molecule which is being detected, e.g., a cell lysate containing a tagged molecule could be incubated with a library of binders to identify binders not only to the tagged molecule but also binders to its associated partner proteins. This would result in a panel of antibodies to these partners which could be used to detect or identify the partner (e.g., using mass spectrometry). Cellular fractionation could be used to enrich targets from particular sub-cellular locations. Alternatively differential biotinylation of surface or cytoplasmic fractions could be used in conjunction with streptavidin detection reagents for eukaryotic display [93, 94]. The use of detergent solubilised target preparations is a particularly useful approach for intact membrane proteins such as GPCRs and ion channels which are otherwise difficult to prepare. The presence of detergents may have a detrimental effect on the eukaryotic cells displaying the binders requiring recovery of binder genes without additional growth of the selected cells.

[0208] Following detection of target recognition by a cognate binder, cells of a clone containing DNA encoding the cognate binder may be recovered. DNA encoding the binder may then be isolated (e.g., identified or amplified) from the recovered clone, thereby obtaining DNA encoding a binder that recognises the target.

[0209] Exemplary binders and targets are detailed elsewhere herein. A classic example is a library of antibody molecules, which may be screened for binding to a target antigen of interest. Other examples include screening a library of TCRs against a target MHC: peptide complex or screening a library of MHC: peptide complexes against a target TCR.

### TCR: MHC and Other Receptor Interactions

[0210] As explained above, the binder and the target in a method for identifying a binder to a target may be a TCR and a MHC: peptide complex, respectively, et vice versa. Hence, display libraries may be libraries of TCRs on surface of yeast cells and mammalian cells. Such libraries may be used to select TCRs with altered recognition properties. Alternatively, display libraries may be libraries of peptides or MHC variants for recognition by TCRs.

[0211] T cell receptors (TCRs) are expressed on T cells and have evolved to recognise peptide presented in complex with MHC molecules on antigen presenting cells. TCRs are heterodimers consisting in 95% of cases of alpha and beta heterodimers and in 5% of cases of gamma and delta heterodimers. Both monomer units have an N terminal immunoglobulin domain which has 3 variable complementarity determining regions (CDRs) involved in driving interaction with target. The functional TCR is present within a complex of other sub-units and signalling is enhanced by co-stimulation with CD4 and CD8 molecules (specific for class | and class II MHC molecules respectively). On antigen presenting cells, proteins are processed, and presented on the cell surface in complex with MHC molecules which are themselves part of a multimeric protein complex. TCRs recognizing peptides originating from “self” are removed during development and the system is poised for recognition of foreign peptides presented on antigen presenting cells to effect an immune response. The outcome of recognition of a peptide: MHC complex depends on the identity of the T cell and the affinity of that interaction.

[0212] It is valuable to identify the genes encoding TCRs or MHC: peptide complexes which drive interactions involved in pathological conditions, e.g., as occurs in autoimmune disease. It would be desirable to engineer TCRs for altered binding e.g. higher affinity to targets of interest, e.g., in re-targeting T cells in cancer or enhancing the effect of existing T cells [95]. Alternatively the behaviour of regulatory or suppressive T cells might be altered as a therapeutic modality, e.g., for directing or enhancing immunotherapy of cancer by introducing specific TCRs into T cells or by using expressed TCR protein as therapeutic entities [96].

[0213] Display of libraries of TCRs on surface of yeast cells and mammalian cells has previously been demonstrated. In the case of yeast cells it was necessary to engineer the TCR and present it in a single chain format. Since the affinity of interaction between TCR and peptide: MHC complex is low, the soluble component (e.g., peptide: MHC in this case) is usually presented in a multimeric format. TCR specificity has been engineered for peptides in complex with MHC class | and MHC class II [98]. TCRs have also been expressed on the surface of a mutant mouse T cells (lacking TCR alpha and beta chains) and variant TCRs with improved binding properties have been isolated [99]. For example Chervin et al. introduced TCRs by retroviral infection and an effective library size of 104 clones was generated [100]. Using nuclease-directed integration of binders as proposed here, a similar approach could be taken to engineering T cells. As well as selecting TCRs with altered recognition properties, display libraries could be used to screen libraries of peptide or of MHC variants for recognition by TCRs. For example peptide: MHC complexes have been displayed on insect cells and used to epitope map TCRs presented in a multimeric format [101]. As noted, screening methods may involve displaying the repertoire of binders on the cell surface and probing with a target presented as a soluble molecule, which may be a multimeric target. An alternative, which can be especially useful with multimeric targets, is to screen directly for cell: cell interactions, where binder and target are presented on the surface of different cells. For example if activation of a TCR of interest led to expression of a reporter gene this could be used to identify activating peptides or activating MHC molecules presented within a peptide: MHC library. In this particular example the reporter cell does not encode the library member but could be used to identify the cell which does encode it. The approach could potentially extend to a “library versus library” approach. For example extending the example described above, a TCR library could be screened against a peptide: MHC library. More broadly the example of screening a library of binders presented on one cell surface using a binding partner on another cell could be extended to other types of cell: cell interactions e.g., identification of binders which inhibit or activate signalling within the Notch or Wnt pathways. Thus the present invention could be used in alternative cell based screening system including recognition systems based on cell: cell interactions.

[0214] As an example, chimeric antigen receptors (“CARS”) represent a fusion between an antibody binding domain (usually formatted as a scFv) and a signalling domain. These have been introduced into T cells with the aim of re-directing the T cell in vivo to attack tumour cells through antibody recognition and binding to tumour-specific antigens. A number of different factors could affect the success of this strategy including the combination of antibody specificity, format, antibody affinity, linker length, fused signalling module, expression level in T cells, T cell sub-type and interaction of the CAR with other signalling molecules [102, 103]. The ability to create large libraries of CARs in primary T cells incorporating individual or combinations of the above variables would allow a functional search for effective and optimal CAR construction. This functional “search” could be carried out in vitro or in vivo. For example Alonso-Camino (2009) have fused a scFv recognizing CEA to the chain of the TCR: CD3 complex and introduced this genetic construct into a human Jurkat cell line [104]. Upon interaction with CEA present on either Hela cells or tumour cells they showed upregulation of the early T cell activation marker CD69. This approach could be used to identify CAR fusion constructs with appropriate activation or inhibitory properties using cultured or primary cells. Further functionality of CAR constructs may be assessed in vivo. For example a library of CARs constructed in primary mouse T cells may be introduced into tumour bearing mice to identify T cell clones stimulated to proliferate through encounter with tumour. If necessary this T cell library could be pre-selected based on antigen binding specificity using the methods described above. In either case the incoming library of binders could be used to replace an existing binder molecule (e.g., MHC or TCR or antibody variable domain).

### Phenotype Screens

[0215] In a preferred method for identifying a binder to a target the binder is ably to modify cell signaling and/or cellular behavior as a result of the action the binder on the target. In more preferred methods, the binder is an antibody.

[0216] Antibodies which modify cell signalling by binding to ligands or receptors have a proven track record in drug development and the demand for such therapeutic antibodies continues to grow. Such antibodies and other classes of functional binders also have potential in controlling cell behaviour in vivo and in vitro. The ability to control and direct cellular behaviour however relies on the availability of natural ligands which control specific signalling pathways. Unfortunately many natural ligands such as those controlling stem cell differentiation (e.g., members of FGF, TGF-beta, Wnt and Notch super-families) often exhibit promiscuous interactions and have limited availability due to their poor expression/stability profiles. Due to their specificity, antibodies have great potential in controlling cellular behaviour.

[0217] The identification of functional antibodies that modify cell signalling has historically been relatively laborious involving picking clones, expressing antibody, characterising according to sequence and binding properties, conversion to mammalian expression systems and addition to functional cell based assays. The eukaryotic display approach described herein will reduce this effort but there is still a requirement for production of antibody and addition to a separate reporter cell culture. Therefore, a preferred alternative may be to directly screen libraries of binders expressed in eukaryotic cells for the effect of binding on cell signalling or cell behaviour by using the production cell itself as a reporter cell. Following introduction of antibody genes, clones within the resulting population of cells showing alteration in reporter gene expression or altered phenotypes can be identified.

[0218] A number of recent publications have described the construction of antibody libraries by cloning repertoires of antibody genes into reporter cells [47, 105, 106]. These systems combine expression and reporting within one cell, and typically introduce a population of antibodies selected against a pre-defined target (e.g., using phage display).

[0219] A population of antibody genes may be introduced into reporter cells to produce a library by methods described herein, and clones within the population with an antibody-directed alteration in phenotype (e.g., altered gene expression or survival) can be identified. For this phenotypic-directed selection to work there is a requirement to retain a linkage between the antibody gene present within the expressing cell (genotype) and the consequence of antibody expression (phenotype). This has been achieved previously either through tethering the antibody to the cell surface as described for antibody display or through the use of semi-solid medium to retain secreted antibodies in the vicinity of producing cells [105]. Alternatively antibodies and other binders can be retained inside the cell [107]. Binders retained on the cell surface or in the surrounding medium can interact with an endogenous or exogenous receptor on the cell surface causing activation of the receptor. This in turn can cause a change in expression of a reporter gene or a change in the phenotype of the cell. As an alternative the antibody can block the receptor or ligand to reduce receptor activation. The gene encoding the binder which causes the modified cellular behaviour can then be recovered for production or further engineering.

[0220] An alternative to this “target-directed” approach, it is possible to introduce a “naive” antibody population which has not been pre-selected to a particular target [108]. The cellular reporting system is used to identify members of the population with altered behaviour. Since there is no prior knowledge of the target, this non-targeted approach has a particular requirement for a large antibody repertoire, since pre-enrichment of the antibody population to the target is not possible. This approach will benefit from using nuclease-directed transgene integration as described in the present invention.

[0221] The “functional selection” approach could be used on other applications involving libraries in eukaryotic cells, particularly higher eukaryotes such as mammalian cells. The antibody could be fused to a signalling domain such that binding to target causes activation of the receptor. Kawahara et al. have constructed chimeric receptors where an extra-cellular scFv targeting fluorescein was fused to a spacer domain (the D2 domain of the Epo receptor) and various intracellular cytokine receptor domain including the thrombopoeitin (Tpo) receptor, erythropoietin (Epo) receptor, gp130, IL-2 receptor and the EGF receptor [109, 110, 111]. These were introduced into an IL-3 dependent proB cell line (BaF3) [27], where chimaeric receptors were shown to exhibit antigen-dependent activation of the chimaeric receptor leading to IL-3 independent growth. This same approach was used in model experiments to demonstrate antigen mediated chemoattraction of BaF3 cells [110]. The approach was extended beyond stable culture cells to primary cells exemplified by the survival and growth of Tpo-responsive haematopoeitic stem cells or IL2 dependant primary T cells where normal stimulation by Tpo and IL-2 respectively was replaced by fluorescein directed stimulation of scFv chimaeric receptors. Thus a system based on chimaeric antibody-receptor chimaeras can be used to drive target dependent gene expression or phenotypic changes in primary or stable reporter cells. This capacity could be used to identify fused binders which drive a signalling response or binders which inhibit the response.

[0222] In a modification of the above approach separate VH and VL domains from an anti-lysozyme antibody were fused to the Epo intracellular domain [113]. Cells grew in response to addition of lysozyme indicating an antigen induced dimerisation or stabilisation of the separate VH and VL fusion partners. Thus three interacting components come together for an optimal response in this system. Although described here with reference to antibody molecules, the above methods for identifying a binder (i.e. an antibody molecule) to a target may also be adapted and performed with libraries of other types of binders.

[0223] Protein fragment complementation represents an alternative system for studying and for selecting protein: protein interactions in mammalian cells [114, 115]. This involves restoring function of split reporter proteins through protein: protein interactions. Reporter proteins which have been used include ubiquitin, DNAE intein, beta-galactosidase, dihydrofolate reductase, GFP, firefly luciferase, beta-lactamase, TEV protease. For example a recent example of this approach is the mammalian membrane 2 hybrid (MaMTH) approach where association of a bait protein: split ubiquitin: transcription factor fusion with a partner protein: split ubiquitin restores ubiquitin recognition and liberates the transcription factor to effect reporter gene expression [116]. Again binders which interfere with or enhance this interaction could be identified through perturbed signalling.

### Recovery and Reformatting of Binders and Encoding DNA

[0224] After a binder is identified via a method for identifying a binder to a target, a common next step will be to isolate (e.g., identify or amplify) the DNA encoding the binder. Optionally, it may be desired to modify the nucleic acid encoding the binder, for example to restructure the binder and/or to insert the encoding sequence into a different vector. Hence, a preferred method for identifying a binder to a target comprises isolating the DNA encoding the binder recognizing the target. More preferred methods are described below. Where the binder is an antibody molecule, a preferred method for identifying a binder to a target comprises isolating DNA encoding the antibody molecule from cells of a clone, amplifying DNA encoding at least one antibody variable region, preferably both the VH and VL domain, and inserting DNA into a vector to provide a vector encoding the antibody molecule. A multimeric antibody molecule bearing a constant domain may be converted to a single chain antibody molecule for expression in a soluble secreted form.

[0225] Antibodies may be presented in different formats but whatever format an antibody is selected in, once the antibody gene is isolated it is possible to reconfigure it in a number of different formats. Once VH or VL domains are isolated, they can be re-cloned into expression vectors encompassing the required partner domains.

[0226] A more preferred method for identifying a binder to a target comprises a reformatting step comprising the reformatting of binders composed of a pair of subunits (e.g., scFv molecules), to a different molecular binder format (e.g., Ig or Fab) in which the original pairing of the subunits is maintained. Such methods are described in more detail elsewhere herein and can be used for monoclonal, oligoclonal or polyclonal clone reformatting. The method can be used to convert “en masse” an entire output population from any of the commonly used display technologies including phage, yeast or ribosome display.

[0227] Additional embodiments of the invention are set out in the following numbered paragraphs which form part of the description.

[0228] 1. A method for identifying a locus in a genome of a eukaryotic cell, said locus being a candidate for insertion of binder sequences, said method comprising:
[0229] a. providing a landing pad sequence;
[0230] b. introducing the landing pad sequence into the eukaryotic cell;
[0231] c. randomly integrating the landing pad sequence into the genome of the eukaryotic cell via transposon-mediated integration;
[0232] d. selecting a clone having a landing pad sequence integrated into its genome.

[0233] 2. The method of paragraph 1 comprising the further steps of:
[0234] e. screening for single-copy integration;
[0235] f. identifying the locus.

[0236] 3. The method of paragraph 2 comprising the additional steps of:
[0237] g. integrating a donor DNA sequence comprising one or more transgenes encoding a binder at the landing pad sequence;
[0238] h. screening for integration of the donor DNA.

[0239] 4. The method of any one of paragraphs 1-3, wherein the landing pad sequence comprises a recognition sequence for a site-specific nuclease.

[0240] 5. The method of paragraph 4, wherein the nuclease recognition sequence is a meganuclease recognition sequence, a zinc finger nuclease recognition sequence, a TALE nuclease recognition sequence or a nucleic acid guided nuclease recognition sequence, preferably a meganuclease recognition sequence.

[0241] 6. The method of paragraph 5, wherein the nuclease recognition sequence is a I-SceI meganuclease recognition sequence.

[0242] 7. The method of any one of paragraphs 4-6, wherein step g of integrating the donor DNA into the cells comprises providing a site-specific nuclease within the cells, wherein the nuclease cleaves the recognition sequence comprised in the landing pad.

[0243] 8. The method of any one of paragraphs 3-7, wherein step h of screening for integration of the donor DNA comprises screening for display of the one or more binders encoded by the donor DNA.

[0244] 9. The method of any one of paragraphs 3-8, wherein the donor DNA further comprises homology arms to increase integration efficiency.

[0245] 10. The method of any one of paragraphs 1-9, wherein the landing pad sequence and/or the donor DNA sequence comprise a selectable marker.

[0246] 11. Use of the locus identified in the method of any one of paragraphs 1 through 10 for building a library of eukaryotic cell clones containing DNA encoding a diverse repertoire of binders.

[0247] 12. An in vitro library of eukaryotic cell clones that express a diverse repertoire of at least 10\hat{ }3, 10\hat{ }4, 10\hat{ }5, 10\hat{ }6, 10\hat{ }7, 10\hat{ }8 or 10\hat{ }9 different binders, each cell containing recombinant DNA wherein donor DNA encoding a binder or subunit of a binder is integrated in a fixed locus in the cellular DNA, the locus being identified by a method according to any one of paragraphs 1-10.

[0248] 13. An in vitro library of eukaryotic cell clones according to paragraph 12, wherein donor DNA encoding a binder or subunit of a binder is integrated in at least a first and/or a second fixed locus in the cellular DNA, wherein said fixed locus or loci are identified by a method according to any one of paragraphs 1-10.

[0249] 14. An in vitro library of eukaryotic cell clones according to paragraph 12 or 13, wherein the locus or loci are in a gene selected from an NLN gene, a TNIK gene, a PARP11 gene, a RAB40B gene, an ABI2 gene, an RNF19B gene, a PKIA gene, or an FTCD gene.

[0250] 15. An in vitro library of eukaryotic cell clones according to any of paragraphs 12-14, wherein the locus or loci are in an NLN gene, a TNIK gene or a RAB40B gene, preferably in an NLN gene.

[0251] 16. An in vitro library of eukaryotic cell clones according to any of paragraphs 12-15, wherein the locus or loci are in an intron of the gene.

[0252] 17. An in vitro library of eukaryotic cell clones according to any of paragraphs 12-16, wherein the locus or loci are in an open chromatin region of the intron.

[0253] 18. An in vitro library of eukaryotic cell clones according to any of paragraphs 12-17, wherein the locus or loci are in an enhancer region of the intron.

[0254] 19. An in vitro library of eukaryotic cell clones according to any of paragraphs 12-18, wherein the locus or loci are in NLN-207 intron 1, 2 or 6 of the NLN gene.

[0255] 20. A binder identified from a library according to any of paragraphs 12-19.

[0256] 21. A method for producing a library of eukaryotic cell clones containing DNA encoding a diverse repertoire of binders, comprising:
[0257] providing donor DNA molecules encoding the binders, and eukaryotic cells;
[0258] introducing the donor DNA into the cells and providing a site-specific nuclease within the cells, wherein the nuclease cleaves a recognition sequence in cellular DNA, wherein the recognition sequence is in an NLN gene, a TNIK gene, a PARP11 gene, a RAB40B gene, an AB/2 gene, an RNF19B gene, a PKIA gene, or an FTCD gene, to create an integration site at which the donor DNA becomes integrated into the cellular DNA, integration occurring through DNA repair mechanisms endogenous to the cells, thereby creating recombinant cells containing donor DNA integrated in the cellular DNA; and
[0259] culturing the recombinant cells to produce clones, thereby providing a library of eukaryotic cell clones containing donor DNA encoding the repertoire of binders.

[0260] 22. A method according to paragraph 21, wherein the recognition sequence is in an NLN gene, a TNIK gene or a RAB40B gene.

[0261] 23. A method according to paragraph 21 or 22, wherein the recognition sequence is in an NLN gene.

[0262] 24. A method according to any one of paragraphs 21-23, wherein the recognition sequence is in an intron of the gene.

[0263] 25. A method according to paragraph 24, wherein the recognition sequence is in an open chromatin region of the intron.

[0264] 26. A method according to paragraph 24 or 25, wherein the recognition sequence is in an enhancer region of the intron.

[0265] 27. A method according to any one of paragraphs 24-26, wherein the recognition sequence is in NLN-207 intron 1, 2 or 6 of the NLN gene.

[0266] 28. A method according to any one of paragraphs 21-27, wherein the binders are antibody molecules.

[0267] 29. A method according to paragraph 28, wherein the antibody molecules are full length immunoglobulins, IgG, Fab, scFv-Fc or scFv.

[0268] 30. A method according to any of paragraphs 21-29, wherein the binders are multimeric, comprising at least a first and a second subunit.

[0269] 31. A method of producing a library of eukaryotic cell clones containing DNA encoding a diverse repertoire of multimeric binders, each binder comprising a first and a second subunit, wherein the method comprises
[0270] providing eukaryotic cells containing DNA encoding the first subunit and providing donor DNA molecules encoding the second binder subunit,
[0271] introducing the donor DNA into the cells and providing a site-specific nuclease within the cells, wherein the nuclease cleaves a recognition sequence in cellular DNA as defined in any of paragraphs 12-18 to create an integration site at which the donor DNA becomes integrated into the cellular DNA, integration occurring through DNA repair mechanisms endogenous to the cells, thereby creating recombinant cells which contain donor DNA integrated in the cellular DNA, and
[0272] culturing the recombinant cells to produce clones containing DNA encoding the first and second subunits of the multimeric binder.

[0273] 32. A method of producing a library of eukaryotic cell clones containing DNA encoding a diverse repertoire of multimeric binders, each binder comprising at least a first and a second subunit, wherein the method comprises
[0274] providing first donor DNA molecules encoding the first subunit, and providing eukaryotic cells
[0275] introducing the first donor DNA into the cells and providing a site-specific nuclease within the cells, wherein the nuclease cleaves a recognition sequence in cellular DNA as defined in any of paragraphs 12-18 to create an integration site at which the donor DNA becomes integrated into the cellular DNA, integration occurring through DNA repair mechanisms endogenous to the cells, thereby creating a first set of recombinant cells containing first donor DNA integrated in the cellular DNA,
[0276] culturing the first set of recombinant cells to produce a first set of clones containing DNA encoding the first subunit,
[0277] introducing second donor DNA molecules encoding the second subunit into cells of the first set of clones, wherein the second donor DNA is integrated into cellular DNA of the first set of clones, thereby creating a second set of recombinant cells containing first and second donor DNA integrated into the cellular DNA, and
[0278] culturing the second set of recombinant cells to produce a second set of clones, these clones containing DNA encoding the first and second subunits of the multimeric binder,
[0279] thereby providing a library of eukaryotic cell clones containing donor DNA encoding the repertoire of multimeric binders.

[0280] 33. A method according to paragraph 32, wherein the second donor DNA molecules are integrated by a method comprising providing a site-specific nuclease within the cells, wherein the nuclease cleaves a recognition sequence in cellular DNA to create an integration site at which the donor DNA becomes integrated into the cellular DNA, integration occurring through DNA repair mechanisms endogenous to the cells.

[0281] 34. A method according to any of paragraphs 21-33, wherein the repertoire of binders is a plurality of polypeptides which share a common structure and have one or more regions of amino acid sequence diversity.

[0282] 35. A method according to any of paragraphs 21-34, wherein the repertoire of binders is a repertoire of antibody molecules differing in one or more complementarity determining regions.

[0283] 36. A method according to any of paragraphs 29-35 wherein the multimeric binders are antibody molecules comprising a heavy chain variable (VH) domain and a light chain variable (VL) domain as separate subunits.

[0284] 37. A method according to paragraph 36, wherein the multimeric binders are whole immunoglobulins.

[0285] 38. A method according 36, wherein the multimeric binders are IgG.

[0286] 39. A method according to paragraph 36, wherein the multimeric binders are Fab.

[0287] 40. A method according to any of paragraphs 36 to 39, wherein the first subunit comprises the VH domain and wherein the second subunit comprises the VL domain.

[0288] 41. A method according to any of paragraphs 36 to 39, wherein the first subunit comprises the VL domain and wherein the second subunit comprises the VH domain.

[0289] 42. A method according to any of paragraphs 36 to 41 wherein the antibody molecule further comprises one or more additional subunits, which may be introduced on the same donor DNA as the first or second subunit or which may be integrated at separate sites in the cellular DNA.

[0290] 43. A method according to any of paragraphs 21-42, wherein the cells are higher eukaryotic cells with a genome size of greater than 2×10\hat{ }7 base pairs.

[0291] 44. A method according to any of paragraphs 21-43, wherein the cells are mammalian, avian, insect or plant cells.

[0292] 45. A method according to paragraph 44, wherein the cells are mammalian, preferably wherein the cells are human.

[0293] 46. A method according to paragraph 45, wherein the cells are HEK293 cells, Chinese hamster ovary (CHO) cells, T lymphocyte lineage cells or B lymphocyte lineage cells or any of the cell lines listed in the “Cancer Cell Line Encyclopedia” or “COSMIC catalogue of somatic mutations in cancer”.

[0294] 47. A method according to paragraph 46, wherein the cells are primary T cells or a T cell line.

[0295] 48. A method according to paragraph 46, wherein the cells are primary B cells, a B cell line, a pre-B cell line or a pro-B cell line.

[0296] 49. A method according to paragraph 48, wherein the cells are murine pre-B cell line 1624-5, IL-3 dependent pro-B cell line Ba/F3 or chicken DT40 B cells.

[0297] 50. A method according to any of paragraphs 21-49, wherein the recognition sequence for the site-specific nuclease occurs only once or twice in the cellular DNA.

[0298] 51. A method according to any of paragraphs 21-50, wherein the site-specific nuclease cleaves cellular DNA to create a double strand break serving as an integration site.

[0299] 52. A method according to any of paragraphs 21-51, wherein the nuclease is a meganuclease.

[0300] 53. A method according to any of paragraphs 21-51, wherein the nuclease is a zinc finger nuclease (ZFN).

[0301] 54. A method according to any of paragraphs 21-51, wherein the nuclease is a TALE nuclease.

[0302] 55. A method according to any of paragraphs 21-51, wherein the nuclease is a nucleic acid guided nuclease.

[0303] 56. A method according to paragraph 55, wherein DNA cleavage is directed by the CRISPR/Cas system.

[0304] 57. A method according to any of paragraphs 21-56, wherein the donor DNA is integrated into the cellular DNA by homologous recombination.

[0305] 58. A method according to any of paragraphs 21-56, wherein the donor DNA is integrated into the genomic DNA by non-homologous end joining or microhomology-directed end joining.

[0306] 59. A method according to any of paragraphs 21-58, wherein the donor DNA comprises a genetic element for selection of cells into which the donor DNA is integrated.

[0307] 60. A method according to any of paragraphs 21-59, wherein integration of the donor DNA into the cellular DNA places expression of the binder and/or expression of a genetic selection element under control of a promoter present within the cellular DNA.

[0308] 61. A method according to any of paragraphs 21-58, wherein the donor DNA comprises a sequence encoding the binder operably linked to a promoter.

[0309] 62. A method according to any of paragraphs 21-61, wherein the library contains at least 100, 10\hat{ }3, 10\hat{ }4, 10\hat{ }5 or 10\hat{ }6 clones, each clone being derived from an individual recombinant cell produced by integration of donor DNA.

[0310] 63. A method according to any of paragraphs 21-62, wherein the library encodes at least 100, 10\hat{ }3, 10\hat{ }4, 10\hat{ }5 or 10\hat{ }6 different binders.

[0311] 64. A method according to any of paragraphs 21-63, wherein each clone contains integrated donor DNA encoding only one or two members of the repertoire of binders.

[0312] 65. A method according to any of paragraphs 21-64, wherein the eukaryotic cells are diploid and contain a recognition sequence for the site-specific nuclease at duplicate fixed loci in the cellular DNA.

[0313] 66. A method according to any of paragraphs 21 to 63, wherein each clone contains integrated donor DNA encoding a single member of the repertoire of binders.

[0314] 67. A method according to any of paragraphs 21-66, wherein the donor DNA molecules each encode a single binder or binder subunit.

[0315] 68. A method according to any of paragraphs 21-67, wherein the binders are displayed on the cell surface.

[0316] 69. A method according to any of the paragraphs 21-68, wherein the binders are secreted from the cells.

[0317] 70. A method according to any of paragraphs 21-69, further comprising:
[0318] culturing the library to express the binders,
[0319] recovering one or more clones expressing a binder of interest, and
[0320] generating a derivative library from the one or more recovered clones, wherein the derivative library contains DNA encoding a second repertoire of binders.

[0321] 71. A method according to paragraph 70, wherein generating the derivative library comprises isolating donor DNA from the one or more recovered clones, introducing mutation into the DNA to provide a derivative population of donor DNA molecules encoding a second repertoire of binders, and introducing the derivative population of donor DNA molecules into cells to create a derivative library of cells containing DNA encoding the second repertoire of binders.

[0322] 72. A method according to paragraph 70, wherein generating the derivative library comprises introducing mutation into the donor DNA in the one or more recovered clones by inducing mutation of the DNA within the clones.

[0323] 73. A method of producing a diverse repertoire of binders, comprising producing a library by a method according to any of paragraphs 21-72 and culturing the library cells to express the binders.

[0324] 74. A library produced by a method according to any of paragraphs 21 to 72.

[0325] 75. A method of screening for a cell of a desired phenotype, wherein the phenotype results from expression of a binder by the cell, the method comprising
[0326] providing a library via the method for producing a library according to any one of paragraphs 21 to 72, or providing a library via the use of paragraph 11, or providing a library according to any of claims 12-19 or 74,
[0327] culturing the library cells to express the binders, and
[0328] detecting whether the desired phenotype is exhibited.

[0329] 76. A method according to paragraph 75, wherein the phenotype is expression of a reporter gene in a cell that expresses the binder.

[0330] 77. A method according to paragraph 75 or paragraph 76, further comprising recovering cells of a clone that expresses a binder that produces the desired phenotype.

[0331] 78. A method according to paragraph 77, further comprising isolating DNA encoding the binder from the recovered clone, thereby obtaining DNA encoding a binder which produces the desired phenotype.

[0332] 79. A method for screening to identify a binder to a target of interest, said method comprising:
[0333] providing a library via the method for producing a library according to any one of paragraphs 21 to 72, or providing a library via the use of paragraph 11, or providing a library according to any of claims 12-19 or 74,
[0334] culturing cells of the library to express the binders,
[0335] exposing the binders to the target, allowing recognition of the target by one or more cognate binders, if present, and
[0336] detecting whether the target is recognised by a cognate binder. 80. A method according to paragraph 75 or 79, wherein the target is provided in soluble form.

[0337] 81. A method according to paragraph 75 or paragraph 79, wherein the target is displayed on the surface of a population of target cells and the binders are displayed on the surface of the library cells, the method comprising exposing the binders to the target by bringing the library cells into contact with the target cells.

[0338] 82. A method according to any of paragraphs 75 to 81, wherein the binders are antibody molecules and the target is an antigen.

[0339] 83. A method according to any of paragraphs 75 to 81, wherein the binders are TCRs and the target is an MHC: peptide complex.

[0340] 84. A method according to any of paragraphs 79 to 83, further comprising detecting target recognition by a cognate binder, and recovering cells of a clone containing DNA encoding the cognate binder.

[0341] 85. A method according to paragraph 84, further comprising isolating DNA encoding the binder from the recovered clone, thereby obtaining DNA encoding a binder that recognises the target.

[0342] 86. A method according to paragraph 78 or paragraph 85, comprising introducing mutation or converting the DNA to modified DNA encoding a restructured binder.

[0343] 87. A method according to paragraph 86, wherein the binder is a scFv and the method comprises converting DNA encoding the scFv to DNA encoding an Ig or fragment thereof while maintaining the original variable VH and VL chain pairings.

[0344] 88. A method according to paragraph 78, 85, 86 or 87, further comprising introducing the DNA into a host cell.

### General Information

[0345] Unless stated otherwise, all technical and scientific terms used herein have the same meaning as customarily and ordinarily understood by a person of ordinary skill in the art to which this invention belongs, and read in view of this disclosure.

### Sequence Identity

[0346] It is to be understood that each nucleic acid molecule or protein fragment or polypeptide or peptide or derived peptide or construct as identified herein by a given sequence identity number (SEQ ID NO) is not limited to this specific sequence as disclosed. Each coding sequence as identified herein encodes a given protein fragment or polypeptide or peptide or derived peptide or construct or is itself a protein fragment or polypeptide or construct or peptide or derived peptide.

[0347] Throughout this application, each time one refers to a specific nucleotide sequence SEQ ID NO (take SEQ ID NO: X as example) encoding a given protein fragment or polypeptide or peptide or derived peptide, one may replace it by:
[0348] i. a nucleotide sequence comprising a nucleotide sequence that has at least 60% sequence identity with SEQ ID NO: X;
[0349] ii. a nucleotide sequence the sequence of which differs from the sequence of a nucleic acid molecule of (i) due to the degeneracy of the genetic code; or
[0350] iii. a nucleotide sequence that encodes an amino acid sequence that has at least 60% amino acid identity or similarity with an amino acid sequence encoded by a nucleotide sequence SEQ ID NO: X.

[0351] Another preferred level of sequence identity or similarity is 70%. Another preferred level of sequence identity or similarity is 80%. Another preferred level of sequence identity or similarity is 90%. Another preferred level of sequence identity or similarity is 95%. Another preferred level of sequence identity or similarity is 99%.

[0352] Throughout this application, each time one refers to a specific amino acid sequence SEQ ID NO (take SEQ ID NO: Y as example), one may replace it by: a polypeptide represented by an amino acid sequence comprising a sequence that has at least 60% sequence identity or similarity with amino acid sequence SEQ ID NO: Y. Another preferred level of sequence identity or similarity is 70%. Another preferred level of sequence identity or similarity is 80%. Another preferred level of sequence identity or similarity is 90%. Another preferred level of sequence identity or similarity is 95%. Another preferred level of sequence identity or similarity is 99%.

[0353] Each nucleotide sequence or amino acid sequence described herein by virtue of its identity or similarity percentage with a given nucleotide sequence or amino acid sequence respectively has in a further preferred embodiment an identity or a similarity of at least 60%, at least 61%, at least 62%, at least 63%, at least 64%, at least 65%, at least 66%, at least 67%, at least 68%, at least 69%, at least 70%, at least 71%, at least 72%, at least 73%, at least 74%, at least 75%, at least 76%, at least 77%, at least 78%, at least 79%, at least 80%, at least 81%, at least 82%, at least 83%, at least 84%, at least 85%, at least 86%, at least 87%, at least 88%, at least 89%, at least 90%, at least 91%, at least 92%, at least 93%, at least 94%, at least 95%, at least 96%, at least 97%, at least 98%, at least 99% or 100% with the given nucleotide or amino acid sequence, respectively.

[0354] Each non-coding nucleotide sequence (i.e. of a promoter or of another regulatory region) could be replaced by a nucleotide sequence comprising a nucleotide sequence that has at least 60% sequence identity or similarity with a specific nucleotide sequence SEQ ID NO (take SEQ ID NO: A as example). A preferred nucleotide sequence has at least 60%, at least 61%, at least 62%, at least 63%, at least 64%, at least 65%, at least 66%, at least 67%, at least 68%, at least 69%, at least 70%, at least 71%, at least 72%, at least 73%, at least 74%, at least 75%, at least 76%, at least 77%, at least 78%, at least 79%, at least 80%, at least 81%, at least 82%, at least 83%, at least 84%, at least 85%, at least 86%, at least 87%, at least 88%, at least 89%, at least 90%, at least 91%, at least 92%, at least 93%, at least 94%, at least 95%, at least 96%, at least 97%, at least 98%, at least 99% or 100% identity with SEQ ID NO: A. In a preferred embodiment, such non-coding nucleotide sequence such as a promoter exhibits or exerts at least an activity of such a non-coding nucleotide sequence such as an activity of a promoter as known to a person of skill in the art.

[0355] The terms “homology”, “sequence identity” and the like are used interchangeably herein. Sequence identity is described herein as a relationship between two or more amino acid (polypeptide or protein) sequences or two or more nucleic acid (polynucleotide) sequences, as determined by comparing the sequences. In a preferred embodiment, sequence identity is calculated based on the full length of two given SEQ ID NO's or on a part thereof. Part thereof preferably means at least 50%, 60%, 70%, 80%, 90%, or 100% of both SEQ ID NO's. In the art, “identity” also refers to the degree of sequence relatedness between amino acid or nucleic acid sequences, as the case may be, as determined by the match between strings of such sequences. “Similarity” between two amino acid sequences is determined by comparing the amino acid sequence and its conserved amino acid substitutes of one polypeptide to the sequence of a second polypeptide. “Identity” and “similarity” can be readily calculated by known methods, including but not limited to those described in Bioinformatics and the Cell: Modern Computational Approaches in Genomics, Proteomics and transcriptomics, Xia X., Springer International Publishing, New York, 2018; and Bioinformatics: Sequence and Genome Analysis, Mount D., Cold Spring Harbor Laboratory Press, New York, 2004, each incorporated herein by reference.

[0356] “Sequence identity” and “sequence similarity” can be determined by alignment of two peptide or two nucleotide sequences using global or local alignment algorithms, depending on the length of the two sequences. Sequences of similar lengths are preferably aligned using a global alignment algorithm (e.g. Needleman-Wunsch) which aligns the sequences optimally over the entire length, while sequences of substantially different lengths are preferably aligned using a local alignment algorithm (e.g. Smith-Waterman). Sequences may then be referred to as “substantially identical” or “essentially similar” when they (when optimally aligned by for example the program EMBOSS needle or EMBOSS water using default parameters) share at least a certain minimal percentage of sequence identity (as described below).

[0357] A global alignment is suitably used to determine sequence identity when the two sequences have similar lengths. When sequences have a substantially different overall length, local alignments, such as those using the Smith-Waterman algorithm, are preferred. EMBOSS needle uses the Needleman-Wunsch global alignment algorithm to align two sequences over their entire length (full length), maximizing the number of matches and minimizing the number of gaps. EMBOSS water uses the Smith-Waterman local alignment algorithm. Generally, the EMBOSS needle and EMBOSS water default parameters are used, with a gap open penalty=10 (nucleotide sequences)/10 (proteins) and gap extension penalty=0.5 (nucleotide sequences)/0.5 (proteins). For nucleotide sequences the default scoring matrix used is DNAfull and for proteins the default scoring matrix is Blosum62 (Henikoff & Henikoff, 1992, PNAS 89, 915-919, incorporated herein by reference).

[0358] Alternatively, percentage similarity or identity may be determined by searching against public databases, using algorithms such as FASTA, BLAST, etc. Thus, the nucleic acid and protein sequences of some embodiments of the present invention can further be used as a “query sequence” to perform a search against public databases to, for example, identify other family members or related sequences. Such searches can be performed using the BLASTn and BLASTx programs (version 2.0) of Altschul, et al. (1990) J. Mol. Biol. 215:403-10, incorporated herein by reference. BLAST nucleotide searches can be performed with the NBLAST program, score=100, wordlength=12 to obtain nucleotide sequences homologous to oxidoreductase nucleic acid molecules of the invention. BLAST protein searches can be performed with the BLASTx program, score=50, wordlength=3 to obtain amino acid sequences homologous to protein molecules of the invention. To obtain gapped alignments for comparison purposes, Gapped BLAST can be utilized as described in Altschul et al., (1997) Nucleic Acids Res. 25 (17): 3389-3402, incorporated herein by reference. When utilizing BLAST and Gapped BLAST programs, the default parameters of the respective programs (e.g., BLASTx and BLASTn) can be used. See the homepage of the National Center for Biotechnology Information accessible on the world wide web at www.ncbi.nlm.nih.gov/.

[0359] In this document and in its claims, the verb “to comprise” and its conjugations is used in its non-limiting sense to mean that items following the word are included, but items not specifically mentioned are not excluded. In addition, the verb “to consist” may be replaced by “to consist essentially of” meaning that a composition as described herein may comprise additional component(s) than the ones specifically identified, said additional component(s) not altering the unique characteristic of the invention. In addition, the verb “to consist” may be replaced by “to consist essentially of” meaning that a method as described herein may comprise additional step(s) than the ones specifically identified, said additional step(s) not altering the unique characteristic of the invention.

[0360] Reference to an element by the indefinite article “a” or “an” does not exclude the possibility that more than one of the element is present, unless the context clearly requires that there be one and only one of the elements. The indefinite article “a” or “an” thus usually means “at least one”.

[0361] As used herein, with “at least” a particular value means that particular value or more. For example, “at least 2” is understood to be the same as “2 or more” i.e., 2, 3, 4, 5, 6, 7, 8, 9, 10, 11, 12, 13, 14, 15, . . . , etc. Furthermore, the terms first, second, third and the like in the description and in the claims, are used for distinguishing between similar elements and not necessarily for describing a sequential or chronological order. It is to be understood that the terms so used are interchangeable under appropriate circumstances and that the embodiments of the invention described herein are capable of operation in other sequences than described or illustrated herein.

[0362] The word “about” or “approximately” when used in association with a numerical value (e.g. about 10) preferably means that the value may be the given value (of 10) more or less 1% of the value.

[0363] As used herein, the term “and/or” indicates that one or more of the stated cases may occur, alone or in combination with at least one of the stated cases, up to with all of the stated cases.

[0364] Various embodiments are described herein. Each embodiment as identified herein may be combined together unless otherwise indicated.

[0365] All patent applications, patents, and printed publications cited herein are incorporated herein by reference in the entireties, except for any definitions, subject matter disclaimers or disavowals, and except to the extent that the incorporated material is inconsistent with the express disclosure herein, in which case the language in this disclosure controls.

[0366] One skilled in the art will recognize many methods and materials similar or equivalent to those described herein, which could be used in the practice of the present invention. Indeed, the present invention is in no way limited to the methods and materials described.

[0367] The present invention is further described by the following examples which should not be construed as limiting the scope of the invention.

### DESCRIPTION OF THE FIGURES

[0368] FIG. 1. Schematic representation of the plnt105 vector comprising a transposon (TR) flanked I-scel landing pad cassette. The landing pad includes a promoter (mPGK) driving expression of a short first exon (Ex1) followed by an intronic sequence containing the I-SceI meganuclease recognition sequence. Annotations: TR—inverted terminal repeats of PiggyBac transposon; mPGK—mouse phosphoglycerate kinase promoter; Ex1—exon 1 of mouse phosphoglycerate kinase; LHA—left homology arm; I-SceI-meganuclease cleavage site; RHA—right homology arm; Ubi—ubiquitin promoter; Puro—puromycin gene; LoxP—locus of cross-over (LoxP and Lox2272 are CRE recombinase sites).

[0369] FIG. 2A-2B. Dot plots showing Fc expression 6 days post transfection without blasticidin selection. HEK293F cells transfected with pINT17-bococizumab and pINT17-5A10i either in the presence or absence of AAVS TALEN nuclease are shown in FIG. 2A. HEK293F cells transfected with pINT74-bococizumab and pINT74-5A10i either in the presence or absence of or NLN CRISPR are shown in FIG. 2B.

[0370] FIG. 3A-3B. Histogram overlay plots showing Fc expression 15 days post transfection (BSD resistant population) (FIG. 3A) and 28 days post transfection (FIG. 3B) in cells transfected with pINT17-bococizumab and 5A10i in the presence of AAVS TALEN nuclease and with pINT74-bococizumab and pINT74-5A10i in the presence of NLN CRISPR. Arrows denote the histogram plot of AAVS integrations.

[0371] FIG. 4A-4B. NLN CHO-K1 gene structure is shown in FIG. 4A, with exons indicated by numbered boxes. FIG. 4B shows the GC content of NLN CHO Intron 1 first 68 kb.

[0372] FIG. 5A-5B. FIG. 5A shows the nuclease cleavage position in NLN CHO Intron 1. FIG. 5B shows the TALEN nuclease right arm DNA insert for CHO NLN intron 1 integration.

[0373] FIG. 6. Antibody expression profiles 2 days post transfection, measured using flow-cytometry based analysis by staining with an anti-human Fc antibody. Left: 884_01_G01 integrated at the AAVS locus; Middle: 5A10i integrated at NLN intron 1; Right: bococizumab integrated at NLN intron 1. PcDNA stands for transfections without nuclease.

[0374] FIG. 7A-7B. Antibody expression profiles 8 days post transfection (FIG. 7A) and 14 days post transfection (FIG. 7B) in cells resistant to BSD, measured using flow-cytometry based analysis by staining with an anti-human Fc antibody. Left: 884_01_G01 integrated at the AAVS locus; Middle: 5A10i integrated at NLN intron 1; Right: bococizumab integrated at NLN intron 1. Shown percentages refer to anti-human Fc antibody-stained cell population whereas shown numbers refer to cell counts. PcDNA stands for transfections without nuclease.

[0375] FIG. 8. Antibody expression profiles 1 day post transfection (left), 7 days post transfection (middle), and 14 days post transfection (right) in cells resistant to BSD, measured using flow-cytometry based analysis by staining with an anti-human Fc antibody. 5A10i and bococizumab were integrated in NLN intron 1 (pINT58-5A10i and pINT58-bococizumab). PcDNA stands for transfections without nuclease.

[0376] FIG. 9. Integration efficiency (%) measured using flow-cytometry based analysis by staining with an anti-human Fc antibody 7 days (left) and 14 days (middle) post transfection without blasticidin selection. 5A10i and bococizumab were integrated in NLN intron 1 (pINT58-5A10i and pINT58-bococizumab). On the right integration efficiency without the use of nuclease is shown.

### OVERVIEW OF SEQUENCES

| SEQ | |
|---|---|
| ID NO: | Description of the sequence |
| 1 | NLN gene |
| 2 | TNIK gene |
| 3 | PARP 11 gene |
| 4 | RAB40B gene |
| 5 | ABI2 gene |
| 6 | RNF19B gene |
| 7 | PKIA gene |
| 8 | FTCD gene |
| 9 | NLN-201 intron 1 |
| 10 | NLN-201 intron 2 |
| 11 | NLN-201 intron 3 |
| 12 | NLN-201 intron 4 |
| 13 | NLN-201 intron 5 |
| 14 | NLN-201 intron 6 |
| 15 | NLN-201 intron 7 |
| 16 | NLN-201 intron 8 |
| 17 | NLN-201 intron 9 |
| 18 | NLN-201 intron 10 |
| 19 | NLN-201 intron 11 |
| 20 | NLN-201 intron 12 |
| 21 | NLN-207 intron 5 |
| 22 | NLN-207 intron 6 |
| 24 | 3′SPLNK-PB-SEQ |
| 25 | 5′SPLNK-PB-SEQ |
| 26 | SPLNK-GATC-TOP |
| 27 | SPLNK-BOT |
| 28 | SPLNK#1 |
| 29 | SPLNK#2 |
| 30 | 3′SPLNK-PB#1 |
| 31 | 3′SPLNK-PB#2 |
| 32 | 5′SPLNK-PB#1 |
| 33 | 5′SPLNK-PB#2 |
| 34 | Clone A02-Chr. 7 |
| 35 | Clone A04-Chr. 5 |
| 36 | Clone A05-Chr. 3 |
| 37 | Clone A06-Chr. 12 |
| 38 | Clone A07-Chr. 17 |
| 39 | Clone A08-multiple hits |
| 40 | Clone A09-Chr. 7 |
| 41 | Clone A10-Chr. 11 |
| 42 | Clone B04-Chr. 2 |
| 43 | Clone B06-Chr. 3 |
| 44 | Clone B07-Chr. 1 |
| 45 | Clone B11-Chr. 8 |
| 46 | Clone B12- Chr. 15 |
| 47 | Clone C01-Chr. 17 |
| 48 | Clone C02-Chr. 2 |
| 49 | Clone C03-Chr. 9 |
| 50 | gRNA targeting intron 2 |
| | of the neurolysin gene |
| 51 | LHA-Seq_Forw primer |
| 52 | LHA_Seq rev primer |
| 53 | RHA_Seq_Forw primer |
| 54 | RHA_Seq_Rev primer |
| 55 | BSD-Seq-Forw primer |
| 56 | BSD-BstBI-Rev primer |
| 57 | NLN Intron 2-CRISPR-1-gBlock |
| 58 | NLN Intron 2-LHA and RHA-gBlock |
| 59 | pINT105 vector |
| 60 | LHA_AsiSI-Forw |
| 61 | NLN_LHA_Nsil-Rev |
| 62 | NLN_RHA_BstZ171_Forw |
| 63 | RHA_Sbfl-Rev |
| 64 | pINT74-5A10i |
| 65 | pINT74-bococizumab |
| 66 | CHO NLN-intron 1 TALEN |
| | recognition site |
| 67 | pINT157-884_01_G01 |
| 68 | pINT158-bococizumab |
| 69 | pINT158-5A10i |
| 70 | I-Scel recognition sequence |
| 71 | nuclease cleavage position in |
| | NLN CHO Intron 1 |
| 72 | over-lap |
| 73 | CHO NLN intron 1 integration site |
| 74 | 3356 |
| 75 | 3357 |
| 76 | meganuclease family |
| | characteristic sequence 1 |
| 77 | meganuclease family |
| | characteristic sequence 2 |

### EXAMPLES

### Example 1: Generation of Hek293 Cell Lines with Integrated I-SceI Meganuclease Recognition Site Via Transposon-Mediated Integration

[0377] 1×10⁷ Hek293 cells were co-transfected with a pINT105 vector comprising a Piggybac (PB) transposon terminal repeat (TR) flanking a landing pad comprising a recognition sequence for I-SceI meganuclease and a puromycin resistance gene driven by the ubiquitin promoter (FIG. 1; SEQ ID NO: 59), a pcDNA 3.0 vector, and a PBase vector (encoding mPB transposase) using Maxcyte (MD, USA) electroporation following the manufacturer's protocol, using an OC100 cuvette. The pcDNA 3.0 vector is an empty vector used as a carrier to normalize the DNA concentration in transfections. Control transfections without the PBase vector were also performed. The DNA amounts used are given in Table 1. After 24 h, transfected cells were plated in 10% DMEM agar plates. 24 h post plating, 2 μg/ml puromycin was added to the cells. Two weeks after puromycin selection, 48 colonies were picked and expanded. Cell pellets were frozen down for genomic DNA extraction. One vial of 10⁷ cells per clone was frozen down and stored in liquid nitrogen.

TABLE 1
DNA amounts used in Hek293 transfection

| | Piggybac vector | | | |
|---|---|---|---|---|
| Reaction | (I-Scel-recognition | | | |
| No | site-landing pad) | PB vector | pcDNA3.0 | Total DNA |
| 1 | 30 ng | 250 ng | 19.72 μg | 20 μg |
| 2 | 30 ng | — | 19.97 μg | 20 μg |
| 3 | 150 ng | 250 ng | 19.6 μg | 20 μg |
| 4 | 150 ng | — | 19.85 μg | 20 μg |

[0378] 20 clones were mapped for the genomic location of landing pad integration using splinkerette PCR as described by Potter and Luo (2010) PLOS ONE 5 (4): e1016. 1 μg of genomic DNA per clone was digested with Sau3a. Then, splinkerette PCR was performed as follows:

### Step 1: Reaction Conditions for Annealing Splinkerette Oligonucleotides

### Component Volume

[0379] SPLNK-BOT (150 ng/μl) 50 μl
[0380] SPLNK-GATC-TOP (150 ng/μl) 50 μl
[0381] 10×NEB Buffer 2 100 μl
[0382] H₂O 800 μl
[0383] Total 1000 μl
[0384] Heated to 95° C. for 3 minutes. Allowed to cool on bench to room temp (˜30 mins). Stored 200 μl aliquots at −20° C.

### Step 2: Ligation to Splinkerette Oligonucleotide Conditions for Ligating Digested Genomic DNA to Annealed Splinkerette Oligonucleotide

### Component Volume

[0385] Digested genomic DNA 35 μl
[0386] H₂O 2.5 μl
[0387] 10×NEB Ligase Buffer 5 μl
[0388] annealed splinkerette oligonucleotide (from step 1) 6 μl
[0389] NEB T4 DNA Ligase (400 U/μl) 1.5 μl
[0390] Total 50 μl
[0391] Incubated at room temperature ≥2 hrs. Proceeded directly to Round 1 PCR.

### Step 3. Round 1 Splinkerette PCR

### Round 1 PCR Reaction.

### Components Volume

[0392] Ligated genomic DNA 10 μl
[0393] H₂O 8.25 μl
[0394] 5× Phusion HF Buffer 5 μl
[0395] 10 mm dNTP 0.5 μl
[0396] SPLNK #1, 10 μM 0.5 μl
[0397] Primer PB #1, 10 μM (see Table 2) 0.5 μl
[0398] Phusion Taq (Finnzymes, FL) 0.25 μl
[0399] Total 25 μl
   PCR conditions for round 1 PCR.
[0400] 98° C. 75 sec
[0401] 98° C. 20 sec→64° C. 15 sec (×2 cycles)
[0402] 98° C. 20 sec→58 or 64° C. 15 sec (58° C. for 3′SPLNK-PB #1 and 64° C. for 5′SPLNK-PB #1, Table 2)→
[0403] 72° C. 2 min (×30 cycles)
[0404] 72° C. 7 min
[0405] 4° C. hold

### Step 4. Round 2 Splinkerette PCR

### Round 2 PCR Reaction.

### Component Volume

[0406] Round 1 PCR product 1 μl (diluted 2×)
[0407] H₂O 31.5 μl
[0408] 5× Phusion HF Buffer 10 μl
[0409] 10 mm dNTP 1 μl
[0410] SPLNK #2, 10 μM 1 μl
[0411] Primer PB #2, 10 μM (see Table 2) 1 μl
[0412] Phusion Taq 0.5 μl
[0413] Total 50 μl

### PCR Conditions for Round 2 PCR.

[0414] 98° C. 75 sec
[0415] 98° C. 20 sec→59 or 66° C. 15 sec (59° C. for 3′SPLNK-PB #2 and 66° C. for 5′SPLNK-PB #2, Table 2)—+72° C. 90 sec (×30 cycles)
[0416] 72° C. 7 min
[0417] 4° C. hold

### Step 5. Antarctic Phosphatase/Exonuclease I Treatment AntPho/ExoI Reaction Conditions.

### Components Volume

[0418] Round 2 splinkerette PCR product 20 μl
[0419] 10×NEB AP Buffer 3.0 μl
[0420] H₂O 3.0 μl
[0421] NEB Antarctic Phosphatase 2.0 μl (New England Biolabs, MA, USA)
[0422] NEB Exonuclease I 2.0 μl (New England Biolabs, MA, USA)
[0423] Total 30 μl

[0424] Incubated reactions at 37° C. for 2 hrs, followed by a 80° C. incubation for 15 min. Used 15 μl of the reaction for sequencing with the appropriate sequencing primer (SEQ ID NO: 17, SEQ ID NO: 18, Table 2).

TABLE 2
Primer sequences used

| | SEQ | | |
|---|---|---|---|
| | ID | | |
| Purpose | NO | Name | Sequence 5′ → 3′ |
| Sequencing | 24 | 3′SPLNK-PB- | ACGCATGATTATCTTTAAC |
| | | SEQ | |
| Sequencing | 25 | 5′SPLNK-PB- | CGACTGAGATGTCCTAAATGC |
| | | SEQ | |
| PCR | 26 | SPLNK-GATC- | GATCCCACTAGTGTCGACACC |
| | | TOP | AGTCTCTAATTTTTTTTTTCA |
| | | | AAAAAA |
| PCR | 27 | SPLNK-BOT | CGAAGAGTAACCGTTGCTAGG |
| | | | AGAGACCGTGGCTGAATGAGA |
| | | | CTGGTGTCGACACTAGTGG |
| PCR | 28 | SPLNK#1 | CGAAGAGTAACCGTTGCTAGG |
| | | | AGAGACC |
| PCR | 29 | SPLNK#2 | GTGGCTGAATGAGACTGGTGT |
| | | | CGAC |
| PCR | 30 | 3′SPLNK-PB#1 | GTTTGTTGAATTTATTATTAG |
| | | | TATGTAAG |
| PCR | 31 | 3′SPLNK-PB#2 | CGATAAAACACATGCGTC |
| PCR | 32 | 5′SPLNK-PB#1 | ACCGCATTGACAAGCACG |
| PCR | 33 | 5′SPLNK-PB#2 | CTCCAAGCGGCGACTGAG |

[0425] PCR was performed for 5′ end of the transposable element, checked on 0.8% agarose gel and sequenced. Obtained sequences were blasted using NCBI-blastn and the genomic locus was identified for each cell line (Table 3):

TABLE 3
Clones and identified loci with integrated transposons comprising the
landing pad sequence with the I-Scel recognition site

| | | | | | Additional |
|---|---|---|---|---|---|
| | | | | | features |
| | Chromosome | | | | (describing |
| | with | | | | gene regulatory |
| | integrated | | | | elements like |
| | transposon | | | | enhancers and |
| | comprising | | | | open chromatin, |
| | the landing | Locus | Ensemble | Intron | as indicated by |
| Clone | pad | (gene | Transcript | location | the Ensemble |
| name | sequence | name) | ID | (size) | genome browser) |
| A02 | 7 | No specific gene | | — | |
| | | identified | | | |
| A04 | 5 | neurolysin | NLN-207 | Intron6-7 | |
| | | | ENST00000509935.2 | (10,589 bp) | |
| A05 | 3 | TRAF2 and NCK | TNIK-204 | Intron2-3 | has open chromatin |
| | | interacting kinase | ENST00000436636.7 | (141,398 bp) | in the intron |
| | | (TNIK) | | | |
| A06 | 12 | poly-ADP- | PARP11-205 | Intron1-2 | |
| | | ribosyltransferase | ENST00000450737.2 | (9254 bp) | |
| | | 11 (PARP11) | | | |
| A07 | 17 | RAB40B | RAB40B-206 | Intron1-2 | has open chromatin |
| | | | ENST00000571995.6 | (33,898 bp) | and enhancers |
| A08 | multiple hits | — | | — | |
| A09 | 7 | No specific gene | | — | |
| | | identified | | | |
| A10 | 11 | No specific gene | In close proximity | — | |
| | | identified | to HSD17B12 | | |
| A11 | read not | — | | — | |
| | determinable | | | | |
| B01 | no hit | — | | — | |
| B04 | 2 | ABI2 | ABI2-203 | Intron1-2 | |
| | | | ENST00000261018.12 | (38,245 bp) | |
| B06 | 3 | TRAF2 and | TNIK-204 | Intron2-3 | has open chromatin |
| | | NCK interacting | ENST00000436636.7 | (141,398 bp) | in the intron |
| B07 | 1 | RNF19B | RNF19B-201 | Intron1-2 | |
| | | | ENST00000235150.5 | (14,276 bp) | |
| B09 | no hit | — | | — | |
| B10 | no hit | — | | — | |
| B11 | 8 | PKIA | PIKA-202 | Intron1-2 | Has 2 open |
| | | | ENST00000396418.7 | (56,342 bp) | chromatin sites |
| B12 | 15 | No specific gene | | — | has open chromatin |
| | | identified | | | |
| C01 | 17 | RAB40B | RAB40B-206 | Intron1-2 | has open chromatin |
| | | | ENST00000571995.6 | (33,898 bp) | and enhancers |
| C02 | 2 | FTCD | FTCDNL1-201 | Intron3-4 | has open chromatin |
| | | | ENST00000416668.5 | (85,239 bp) | and enhancers |
| C03 | 9 | No specific gene | | — | |
| | | identified | | | |

The sequencing results per clone are as follows: Clone A02-Chr. 7 (SEQ ID NO: 34), Clone A04-Chr. 5 (SEQ ID NO: 35), Clone A05-chr. 3 (SEQ ID NO: 36), Clone A06-Chr. 12 (SEQ ID NO: 37), Clone A07-Chr. 17 (SEQ ID NO: 38), Clone A08-multiple hits (SEQ ID NO: 39), Clone A09-Chr. 7 (SEQ ID NO: 40), Clone A10-Chr. 11 (SEQ ID NO: 41), Clone B04-Chr. 2 (SEQ ID NO: 42), Clone B06-Chr. 3 (SEQ ID NO: 43), Clone B07-Chr. 1 (SEQ ID NO: 44), Clone B11-Chr. 8 (SEQ ID NO: 45), Clone B12- Chr. 15 (SEQ ID NO: 46), Clone C01-Chr. 17 (SEQ ID NO: 47), Clone C02-Chr. 2 (SEQ ID NO: 48), Clone C03-Chr. 9 (SEQ ID NO: 49).

### Example 2: Validation of the Cell Lines by Transfecting with SceI Meganuclease and FGFR1 and FGFR2 as Donor DNA

[0426] The clones generated by PB transposon-mediated integration were validated for integration efficiency, single-copy integration analysis and antibody expression. For this purpose, the clones were co-transfected with equal proportion of two donor plasmids containing anti-FGFR1 scFv and anti-FGFR2 scFv in Fc format in the presence or absence of I-SceI meganuclease plasmid. Transfection with a mixture of anti-FGFR1 and a-FGFR2 antibodies affords an opportunity to examine the proportion of cells containing multiple integration events. For an individual cell with a correctly integrated cassette (e.g., anti-FGFR1) there is approximately a 50:50 chance that a second integration will be of the alternative specificity (i.e., anti-FGFR2). If there are frequent multiple integrations, then the proportion of double-positive clones will be high. The donor plasmids were described in WO2015/166272.

[0427] Transfection was performed in two batches: Batch 1 included clones A09, A10, B03, B05, B07, B09 and B12. Batch 2 included A02, A04, A05, A06, A07, A08, A11, B01, B04, B06, B10, B11, C01, C02 and C03. The day prior to transfection, the cells or HEK293-F cells were seeded at 0.5×10⁶ cells/ml. On the day of transfection, the cells were transfected using Maxcyte (MD, USA) electroporation following the manufacturer's protocol. Donor DNA (anti-FGFR1 and anti-FGFR2) was 1 μg for each in all transfections (including controls). Meganuclease DNA was 20 μg. HEK293F TALEN cells were used as controls in both batches (described in WO2015/166272). Control cells were transfected with equal proportion of two donor plasmids containing anti-FGFR1 scFv and anti-FGFR2 scFv in Fc format in the presence or absence of AAVS TALE nuclease plasmid which can integrate binders in the AAVS locus via TALEN-mediated integration. The TALEN DNA used was 10 μg (TAL L) and 10 μg (TAL R).

[0428] Transfected cells were plated in 10 cm petri dishes and were subjected to blasticidin selection after 2 days of transfection. Media in the plates were replenished with fresh media containing blasticidin every 3-4 days until day 20. Blasticidin-resistant colonies were scored to calculate the integration efficiency. Integration efficiency ranged from 0-1% and the fold-difference between the plus and minus nuclease varied among the clones. Clones A09, B12, and C03 showed higher fold difference between the plus and minus I-SceI meganuclease compared to other clones. Among these three clones, C03 showed the highest integration efficiency (1%). Looking at the integration efficiency of the remaining clones, A04 and B01 had 0.5% and 0.6% respectively.

[0429] In parallel, the transfected cells were also cultured in suspension and subjected to BSD selection from day 2 until day 20 with media change every 3-4 days. At day 20, cells were dual-stained with FGFR1-Dy633 and

[0430] FGFR2-Dy488. Flow cytometry-based analysis was performed using an Intellicyt IQUE screener (Sartorius AG, GE). The cytometer was equipped with 488 (blue) and 640 nm (red) lasers and emission filter for PE (LP: —, BP: 572/28) and To-Pro3 (LP: —, BP: 675/30). For the FGR1/2 staining, 10 nM of FGFR1-Dy633 and FGFR2-Dy488 were added to 100 μl of cells. These were incubated for 30 minutes in the dark at 4° C. 900 μl of 0.1% PBS was then added before centrifugation at 600×g for 2.5 minutes. The cells were washed with 1 ml of 0.1% BSA, and resuspended in 500 μl of 0.1% BSA. 50 μl was removed and added to wells of a 96 well plate for subsequent analysis. Dual staining of a cell with the antigens can indicates multiple-copy integration (more than one antibody gene integrated per cell). Antibody-negative populations were observed in all transfected clones. These populations were removed from the calculations of single-copy and multiple-copy integration analysis. The results are given in Table 4:

TABLE 4
% of FGR1-stained, FGR2-stained, and double FGR1-/FGR2-stained cells
(double positive), calculated with negative population removed.
HEK293F-TALEN cells integrate binders in the AAVS locus.

| Clone | FGR1-stained | FGR2-stained | Double positive |
|---|---|---|---|
| A09 | 49 | 41 | 10 |
| A10 | 44 | 48 | 9 |
| B07 | 46 | 47 | 8 |
| B09 | 46 | 47 | 6 |
| B12 | 42 | 51 | 5 |
| HEK293F TALEN | 39 | 50 | 11 |
| A02 | 55 | 41 | 4 |
| A04 | 36 | 57 | 7 |
| A05 | 45 | 46 | 9 |
| A06 | 43 | 53 | 4 |
| A07 | 42 | 50 | 7 |
| A08 | 52 | 38 | 10 |
| A11 | 48 | 48 | 4 |
| B01 | 42 | 48 | 10 |
| B04 | 46 | 49 | 5 |
| B06 | 55 | 41 | 4 |
| B10 | 44 | 47 | 9 |
| B11 | 61 | 33 | 7 |
| C01 | 41 | 51 | 8 |
| C02 | 46 | 43 | 9 |
| C03 | 39 | 53 | 8 |
| HEK293F TALEN | 48 | 39 | 13 |

### Example 3: Evaluation of the Neurolysin (NLN) Gene for Expression of Binders

[0431] To evaluate the capacity of the NLN locus for binder expression, a design for genomic integration of a cassette comprising a promoterless blasticidin gene and a gene expressing the anti-PCSK9 antibodies 5A10i or bococizumab (Boco) in NLN was made. Vectors pINT17-5A10i and pINT17-bococizumab originate from the pINT17-BSD vector (described in Parthiban et al. 2019 mAbs, 11:5, 884-898) which is a second-generation display vector which is a derivative of the pD2 vector described in WO2015/166272, which directs integration of comprised genes in the AAVS locus, in which cassettes comprising 5A10i and bococizumab expressing genes were inserted, respectively.

[0432] Integration of the cassette was achieved via CRISPR-mediated integration via the inclusion of a gRNA targeting intron 2 of the neurolysin gene (NLN-207) (TCACTCGTATTACGTTTACA, SEQ ID NO: 50) in the cassette. Homology arms of 800 bp were included in the cassette at either end to facilitate homologous recombination. The left homology arm (LHA) was flanked by an AsiSI recognition site on the 5′end and an NsiI recognition site on the 3′ end. The right homology arm (RHA) was flanked by a BstZ171 recognition site on the 5′end and a SbfI recognition site on the 3′ end. The left homology arm was amplified by PCR using primers LHA_AsiSI-Forw (SEQ ID NO: 60) and NLN_LHA-NsiI-Rev (SEQ ID NO: 61) and right homology arm was amplified using primers NLN-RHA-BstZ171_Forw (SEQ ID NO: 62) and RHA_SbfI-Rev (SEQ ID NO: 63) (primers are shown in Table 5) and ligated to the cassettes followed by restriction-digestion of the PCR products and vectors pINT17-5A10i and pINT17-bococizumab using the abovementioned enzymes and ligation. This resulted in pINT74-5A10i (SEQ ID NO: 64) and pINT74-bococizumab (SEQ ID NO: 65) vectors, which direct integration of the comprised genes in intron 2 of NLN (NLN-207).

TABLE 5
Primers

| SEQ | | |
|---|---|---|
| ID | | |
| NO | Primer | Sequence |
| 51 | LHA-Seq_Forw | TGCCAGATTCAGCAACGGAT |
| 52 | LHA_Seq_rev | GTCTTCGGAGATGGGGATGC |
| 53 | RHA_Seq_Forw | AGTTTTTCCTGCACGGGTAG |
| | | T |
| 54 | RHA_Seq_Rev | GCTTAATGCGCCGCTACAG |
| 55 | BSD-Seq-Forw | ACCTGTATCGTGGCCATTGG |
| 56 | BSD-BstBI-Rev | CGCTTGGTCGGTCATTTCG |
| 60 | LHA_AsiSI-Forw | CTTTGTTTTTTCGCGATCGC |
| 61 | NLN_LHA_Nsil-Rev | AAAACCTTGATGCATAACTC |
| | | ACGTC |
| 62 | NLN_RHA_BstZ171_Forw | ATTGGGTTTAAGTATACGGG |
| | | TAGGTA |
| 63 | RHA_Sbfl-Rev | TTCAGGAAAAACACCTGCAG |
| | | G |

[0433] Template sequences used: NLN Intron 2-CRISPR-1-gBlock (SEQ ID NO: 57), NLN Intron 2-LHA and RHA-gBlock (SEQ ID NO: 58).

[0434] Correct integration of the cassette in the targeted locus results in the expression of the blasticidin resistance gene and allows for correctly integrated clones to grow in the presence of the antibiotic, as described in WO2015/166272. The integration efficiency of the cassettes designed for integration in NLN intron 2 (NLN-207) was compared with the integration efficiency of cassettes designed for integration in the AAVS locus via TALEN-mediated integration, as described in WO2015/166272. HEK293F cells were transfected using Maxcyte electroporation (MD, USA), following the manufacturer's protocol. Control transfections without the TALEN- or CRISPR vectors were also performed. Table 6 shows the transfection conditions:

TABLE 6
Maxcyte transfection of HEK293F cells.
Total amount of cells used was 1 × 10⁷.
Total amount of DNA used was 22 μg.
Total reaction volume was 0.1 ml.
Cell concentration and DNA concentration
values were 1 × 10⁸ cells/ml and 220 μg/ml, respectively.
Amount of pINT17-Boco, pINT74-Boco,
pINT17-5A10i, pINT74-5A10i used was 2 μg. pcDNA3.0 (20 μg)
was used as a control for the samples without the TALE nucleases
or CRISPR/CAS9.

| | | AAVS TALEN | | |
|---|---|---|---|---|
| Reaction | Donor DNA | (left and right) | NLN-CRISPR | pcDNA 3.0 |
| 1 | pINT17-Boco | 10 + 10 μg | — | — |
| 2 | pINT17-Boco | — | — | 20 μg |
| 3 | pINT17-5A10i | 10 + 10 μg | — | |
| 4 | pINT17-5A10i | — | — | 20 μg |
| 5 | pINT74-Boco | — | 20 μg | — |
| 6 | pINT74-Boco | — | — | 20 μg |
| 7 | pINT74-5A10i | — | 20 μg | |
| 8 | pINT74-5A10i | — | — | 20 μg |

[0435] Following transfection, cells were plated in the presence or absence of blasticidin. Blasticidin resistant colonies were stained with methylene blue 12 days post-transfection, and counted to measure integration efficiency. Integration efficiency for cells transfected with AAVS TALEN was 0.26% for pINT17-Boco and 0.35% for pINT17-5A10i and with NLN CRISPR was 0.23% for pINT74-bococizumab and 0.53% for pINT74-5A10i (Table 7).

TABLE 7
BSD resistant colonies stained with methylene blue.
10⁴ cells were originally plated per plate.

| | | BSD resistant | Integration | |
|---|---|---|---|---|
| Reaction | Donor DNA | colonies | efficiency | Condition |
| 1 | pINT17-Boco | 26 | 0.26 | plus AAVS TALEN |
| 2 | pINT7-Boco | 1 | 0.01 | minus nuclease |
| 3 | pINT17-5A10i | 35 | 0.35 | plus AAVS TALEN |
| 4 | pINT17-5A10i | 0 | 0 | minus nuclease |
| 5 | pINT74-Boco | 23 | 0.23 | plus CRISPR |
| 6 | pINT74-Boco | 3 | 0.03 | minus CRISPR |
| 7 | pINT74-5A10i | 53 | 0.53 | plus CRISPR |
| 8 | pINT74-5A10i | 9 | 0.09 | minus CRISPR |

[0436] Integration efficiency was also quantitated by measuring the Fc expression at 6 days post transfection in the cells without BSD selection using flow cytometry-based analysis by staining with an anti-human Fc antibody (BioLegend cat #409304). Flow cytometry-based analysis was performed using an Intellicyt IQUE screener (Sartorius AG, GE). The cytometer was equipped with 488 (blue) and 640 nm (red) lasers and emission filter for PE (LP: —, BP: 572/28) and To-Pro3 (LP: —, BP: 675/30). For anti-human Fc antibody staining, 1×10⁶ cells were washed 2× with 0.1% BSA PBS, incubated with 1 μl of the labelling antibody in 100 μl of 1% BSA PBS (7.5% BSA Fraction V-Gibco (Cat. No: 15260037) for 30 minutes at 4° C., protected from light, washed again with PBS and analysed. The difference in the number of Fc positive cells between the presence and absence of nuclease is a way to measure the integration efficiency. Cells transfected with 5A10i in the presence of nuclease show 3.99% and 3.38% for AAVS TALEN- and NLN CRISPR-respectively (FIGS. 2A and 2B).

[0437] In parallel the transfected cells were also cultured in suspension and subjected to BSD selection. 15 days post-transfection, cells were stained with the anti-human Fc antibody and subjected to flow-cytometry based analysis. The BSD-resistant population showed Fc expression on the cell surface and the expression level looks similar between the cells integrated in AAVS and NLN loci (FIG. 3A):

[0438] Further, 28 days post-transfection, the stability of Fc expression was tested by staining of the BSD-resistant population with anti-human Fc antibody. The antibodies integrated in the NLN locus show homogenous expression (FIG. 3B).

### Example 4: Validation of the NLN Locus in CHO Cells

[0439] The aim of this example was to test stable surface antibody presentation from neurolysin (NLN) intron 1 loci in CHO-s cells.

### Experimental Procedures

[0440] Integration of antibody genes was performed in the AAVS locus using CRISPR/Cas9 (as described in WO2019/110691) or in NLN intron 1 using TALEN (SEQ ID NO: 66). CHO-s cells were co-transfected with a targeting plasmid harboring a variant bococizumab antibody gene (pINT157-884_01_G01 (SEQ ID NO: 67), described in Dyson et al. 2020 mAbs, 12:1, 1829335, for AAVS-targeting. CHO-s cells were co-transfected with targeting plasmids harboring bococizumab and 5A10i (pINT158-bococizumab (SEQ ID NO: 68) and PINT158-5A10i (SEQ ID NO: 69) for NLN intron 1 targeting. 5A10i and Bococizumab represent well- and poorly-behaved antibodies respectively, therefore differential display of the antibodies was expected. This can be assessed by changes in the magnitude of signal (e.g., MFI) detected by a secondary-fluorescent antibody directed at Fc regions of the displayed antibody (anti-human Fc antibody, described in Example 3). The experiment was done in duplicate in the case of transfections with TALEN pDNA (see Tables 8 and 10). FIGS. 4A and 4B show the NLN gene structure in CHO cells and FIGS. 5A and 5B show the NLN intron 1 TALEN targeting design.

### Cell Culture, Flow Cytometry and Staining

[0441] All CHO-S cell lines were cultivated in CD Opticho Media (for CHO-F cells; catalogue no. 12681-011, Life Technologies, California, USA) supplemented with 8 mM L-Glut (catalogue no. 25030-024, Life Technologies, California, USA) and typically maintained in 25 ml culture passaged every 72/96 hours. BSD (blasticidin) concentration for selection was 3 μg/ml. To estimate transgene integration efficiency, a duplicate culture without BSD selection was also maintained.

[0442] Anti-human Fc antibody cell staining and flow-cytometric analysis was performed as described in Example 3.

### Transfections

[0443] Transfections were performed using Maxcyte (MD, USA) transfection following the manufacturer's protocol (see also Table 6). TALEN-mediated integration was performed as described in WO2015/166272. The transfection plan is summarized in Table 8 below:

TABLE 8
Transfection plan summary. pcDNA 3.0 was used
in negative control transfections
(no nuclease). TALEN mRNA refers to
donor DNA + TALEN mRNA and
TALEN pDNA to donor DNA + TALEN plasmid.

| Reaction | Donor DNA | Locus | Integration method |
|---|---|---|---|
| 1 | pINT157-884_01_G01 | AAVS | CRISPR |
| 2 | pINT157-884_01_G01 | AAVS | pcDNA 3.0 |
| 3 | pINT158-5A10i | NLN intron 1 | TALEN pDNA |
| 4 | pINT158-5A10i | NLN intron 1 | TALEN mRNA |
| 5 | pINT158-5A10i | NLN intron 1 | pcDNA 3.0 |
| 6 | pINT158-Bococizumab | NLN intron 1 | TALEN pDNA |
| 7 | pINT158-Bococizumab | NLN intron 1 | TALEN mRNA |
| 8 | pINT158-Bococizumab | NLN intron 1 | pcDNA 3.0 |

### Results

### Anti-Human Fc Antibody Staining 2 Days Post Transfection

[0444] 2 days post transfection samples were stained with an anti-human Fc antibody for detection of transient antibody expression. Samples transfected with TALEN mRNA showed increased expression over both pcDNA and TALEN pDNA, suggesting early integration/expression of antibody-gene cassettes. A difference in expression profiles between 5A10i and bococizumab was also observed as expected due to the ‘good’ and ‘bad’ presentation profiles of the antibodies, respectively (FIG. 6).

[0445] Anti-human Fc antibody staining 8 days post transfection (BSD-resistant cells) 8 days post transfection, samples taken from cells cultured in the presence of BSD were stained with an anti-human Fc antibody for detection of antibody cell surface expression. 8 days post transfection is still an early time-point for generating a clean, stably expressing cell line as cells are still under antibiotic selection. Despite this, a fairly clean population of >78% anti-human Fc antibody positive cells was observed in cells wherein 5A10i was integrated in NLN intron 1, in contrast to bococizumab which only displayed >7%, likely due to the inherent bad display properties of the antibody (FIG. 7A). As expected, samples taken from transfections using pcDNA showed little to no expression in the absence of nuclease-mediated gene integration.

### Anti-Human Fc Antibody Staining 14 Days Post Transfection (BSD-Resistant Cells)

[0446] 14 days post transfection samples taken from cells cultured in the presence of BSD were stained with an anti-human Fc antibody for detection of antibody cell surface expression. A clear shift of the whole population was observed for in cells wherein 5A10i was integrated in NLN intron 1 (FIG. 7B). This confirmed the utility of targeting antibody expression to NLN intron 1. There was a clear differential expression between 5A10i and bococizumab confirming developability of cell-surface display based on antibody biophysical properties.

Integration Efficiency 8 Days and 14 Days Post Transfection (without BSD Selection)

[0447] Samples taken from cells cultured without the presence of BSD were stained with an anti-human Fc antibody for integration efficiency measurements at 8- and 14-days post transfection. The results are given in Table 9 below:

TABLE 9
Integration efficiency measurements in samples taken from
cells cultured without the presence of
BSD. Numbers refer to % of positive cells within the gate.

| | | | % positive | % positive |
|---|---|---|---|---|
| | | | cells 8 days | cells 14 days |
| | | Integration | post | post |
| Donor DNA | Locus | method | transfection | transfection |
| pINT157- | AAVS | CRISPR | 0.29 | 0.24 |
| 884_01_G01 | | | | |
| pINT157- | AAVS | pcDNA 3.0 | 0.20 | 0.12 |
| 884_01_G01 | | | | |
| pINT158-5A10i | NLN | TALEN | 2.41 | 1.05 |
| | intron 1 | pDNA | | |
| pINT158-5A10i | NLN | TALEN | 2.64 | 1.16 |
| | intron 1 | mRNA | | |
| pINT158-5A10i | NLN | pcDNA 3.0 | 0.12 | 0.15 |
| | intron 1 | | | |
| pINT158- | NLN | TALEN | 0.46 | 0.06 |
| Bococizumab | intron 1 | pDNA | | |
| pINT158- | NLN | TALEN | 0.25 | 0.04 |
| Bococizumab | intron 1 | mRNA | | |
| pINT158- | NLN | pcDNA 3.0 | 0.07 | 0.06 |
| Bococizumab | intron 1 | | | |

[0448] At 8 days post transfection, the measurements from samples taken from cells cultured without BSD stained with anti-human Fc antibody represent an approximate number for antibody-gene integration efficiency. Based on the 5A10i antibody, a ˜2.5% integration efficiency with both TALEN plasmid DNA and TALEN mRNA was achieved in the case of the design targeting intron 1 of NLN.

### Repeat Transfection Experiment:

[0449] The following transfections were repeated to check the reproducibility of targeting intron 1 of NLN (Table 10):

TABLE 10
Repeat transfection summary. pcDNA 3.0 was used in negative
control transfections (no nuclease). TALEN pDNA refers
to donor DNA + TALEN plasmid.

| Reaction | Donor DNA | Locus | Integration method |
|---|---|---|---|
| 3 | pINT158-5A10i | NLN-Design 1 | TALENs pDNA |
| 5 | pINT158-5A10i | NLN-Design 1 | pcDNA |
| 6 | pINT158-Bococizumab | NLN-Design 1 | TALENs pDNA |
| 8 | pINT158-Bococizumab | NLN-Design 1 | pcDNA |

### BSD-Resistant Cells

[0450] Samples taken from cell cultures in the presence of BSD were stained using an anti-human Fc antibody at 1-, 7- and 14-days post transfection. Expression profiles of bococizumab and 5A10i show differential expression based on the inherent biophysical properties of the two antibodies. The results confirm the reproducibility and utility of targeting antibody expression for mammalian display (FIG. 8).

Integration Efficiency Measured at 7 Days Post Transfection and 14 Days Post Transfection (without BSD Selection)

[0451] Samples taken from cell cultures without the presence of BSD were stained for integration efficiency measurements at 7- and 14-days post transfection with an anti-human Fc antibody. Numbers refer to % of positive cells within the gate. Integration efficiency of up to 4.6% were achieved at 7 days post transfection which was still detectable at 3.3% at 14 days post transfection (FIG. 9). These numbers confirm the integration efficiency previously observed in the design targeting intron 1 of NLN.

### REFERENCES

[0452] All references listed below and others cited anywhere in this disclosure are incorporated herein by reference in their entirety.
[0453] 1 Russell, S. et al. (1993). Retroviral vectors displaying functional antibody fragments. Nucleic Acids Res, 21 (5), 1081-1085.
[0454] 2 Boublik, Y et al. (1995). Eukaryotic virus display: Engineering the major surface glycoprotein of the Autographa californica nuclear polyhedrosis virus (AcNPV) for the presentation of foreign proteins on the virus surface. Nature Biotechnology, 13 (10), 1079-1084.
[0455] 3 Mottershead, D. G. et al (2000). Baculoviral display of functional scFv and synthetic IgG-binding domains. Biochemical and Biophysical Research Communications, 275 (1), 84-90.
[0456] 4 Oker-Blom, C. et al. (2003). Baculovirus display strategies: Emerging tools for eukaryotic libraries and gene delivery. Briefings in Functional Genomics and Proteomics, 2 (3), 244-253.
[0457] 5 Edwards, B. M. et al. (2003). The Remarkable Flexibility of the Human Antibody Repertoire; Isolation of Over One Thousand Different Antibodies to a Single Protein, BLyS. Journal of Molecular Biology, 334 (1), 103-118. doi: 10.1016/j.jmb. 2003.09.054
[0458] 6 Pershad, K. et al. (2010). Generating a panel of highly specific antibodies to 20 human SH2 domains by phage display. Protein Engineering, Design and Selection, 23 (4), 279-288. doi: 10.1093/proteinlgzq003
[0459] 7 Schofield, D. J. et al. (2007). Application of phage display to high throughput antibody generation and characterization. Genome Biol, 8 (11), R254.
[0460] 8 Salema, V. et al. (2013). Selection of Single Domain Antibodies from Immune Libraries Displayed on the Surface of E. coli Cells with Two P-Domains of Opposite Topologies. PLOS ONE, 8 (9), e75126. doi: 10.1371/journal. pone. 0075126.s007
[0461] 9 Chao, G. et al. (2006). Isolating and engineering human antibodies using yeast surface display. Nat Protoc, 1 (2), 755-768.
[0462] 10 Higuchi, K. et al. (1997). Cell display library for gene cloning of variable regions of human antibodies to hepatitis B surface antigen. J Immunol Methods, 202 (2), 193-204.
[0463] 11 Ho, M. et al. (2006). Isolation of anti-CD22 Fv with high affinity by Fv display on human cells. Proc Natl Acad Sci USA, 103 (25), 9637-9642. doi: 10.1073/pnas. 0603653103
[0464] 12 Ho, M. et al. (2009). Display and selection of scFv antibodies on HEK-293T cells. Methods Mol Biol, 562, 99-113. doi: 10.1007/978-1-60327-302-2 8
[0465] 13 Akamatsu, Y., Pakabunto, K., Xu, Z., Zhang, Y., & Tsurushita, N. (2007). Whole IgG surface display on mammalian cells: Application to isolation of neutralizing chicken monoclonal anti-IL-12 antibodies. Journal of Immunological Methods, 327 (1-2), 40-52. doi: 10.1016/j.jim. 2007.07.007
[0466] 14 Beerli, R. R., Bauer, M., Buser, R. B., Gwerder, M., Muntwiler, S., Maurer, P., et al. Isolation of human monoclonal antibodies by mammalian cell display. Proc Natl Acad Sci USA. 2008 Sep. 23; 105 (38): 14336-41. doi: 10.1073/pnas. 0805942105
[0467] 15 Breous-Nystrom, E., Schultze, K., Meier, M., Flueck, L., Holzer, C., Boll, M., et al. (2013). Retrocyte Display@ technology: Generation and screening of a high diversity cellular antibody library. Methods, 1-11. doi: 10.1016/j.ymeth. 2013.09.003
[0468] 16 Grindley, Whiteson & Rice. Mechanisms of Site-Specific Recombination. Annu Rev Biochem 2006 75:567-605
[0469] 17 Zhou, C., Jacobsen, F. W., Cai, L., Chen, Q., Shen, W. D. (2010). Development of a novel mammalian cell surface antibody display platform. mAbs, 2 (5), 508-518
[0470] 18 Li, C. Z., Liang, Z. K., Chen, Z. R., Lou, H. B., Zhou, Y., Zhang, Z. H., et al. (2012). Identification of HBsAg-specific antibodies from a mammalian cell displayed full-length human antibody library of healthy immunized donor. Cellular and Molecular Immunology, 9 (2), 184-190.
[0471] 19 Buchholz, F., Ringrose, L., Angrand, P. O., Rossi, F., & Stewart, A. F. (1996). Different thermostabilities of FLP and Cre recombinases: Implications for applied site-specific recombination. Nucleic Acids Res, 24 (21), 4256-4262.
[0472] 20 Schaft, J., Ashery-Padan, R., Van Hoeven, F. D., Gruss, P., & Francis Stewart, A. (2001). Efficient FLP recombination in mouse ES cells and oocytes. Genesis, 37 (1), 6-10.
[0473] 21 Moehle, E. A., Moehle, E. A., Rock, J. M., Rock, J. M., Lee, Y.-L., Lee, Y. L., et al. (2007). Targeted gene addition into a specified location in the human genome using designed zinc finger nucleases. Proc Natl Acad Sci USA, 104 (9), 3055-3060. doi: 10.1073/pnas. 0611478104
[0474] 22 Cristea, S., Freyvert, Y., Santiago, Y., Holmes, M. C., Urnov, F. D., Gregory, P. D., Cost, G. J. (2013). In vivo cleavage of transgene donors promotes nuclease-mediated targeted integration. Biotechnology and Bioengineering/10 (3), 871-880. doi: 10.1002/bit. 24733
[0475] 23 Letourneur, F., Malissen, B. (1989). Derivation of a T cell hybridoma variant deprived of functional T cell receptor alpha and beta chain transcripts reveals a nonfunctional alpha-mRNA of BW5147 origin. European Journal of Immunology, 19 (12), 2269-2274. doi: 10.1002/eji. 1830191214
[0476] 24 Kanayama, N., Todo, K., Reth, M., Ohmori, H. (2005). Reversible switching of immunoglobulin hypermutation machinery in a chicken B cell line. Biochem Biophys Res Commun, 327 (1), 70-75. doi: 10.1016/j.bbrc. 2004.11.143
[0477] 25 Lin, W., Kurosawa, K., Murayama, A., Kagaya, E., 8 Ohta, K. (2011). B-cell display-based one-step method to generate chimeric human IgG monoclonal antibodies. Nucleic Acids Research, 39 (3), e14-e14. doi: 10.1093/nar/gkq1122
[0478] 26 Adachi, N., So, S., liizumi, S., Nomura, Y., Murai, K., Yamakawa, C., et al. (2006). The human pre-B cell line Nalm-6 is highly proficient in gene targeting by homologous recombination. DNA and Cell Biology, 25 (1), 19-24. doi: 10.1089/dna. 2006.25.19
[0479] 27 Palacios, R., 8 Steinmetz, M. (1985). IL3-Dependent mouse clones that express B-220 surface antigen, contain Ig genes in germ-line configuration, and generate B lymphocytes in vivo. Cell, 41 (3), 727-734
[0480] 28 Barretina, J., Caponigro, G., Stransky, N., Venkatesan, K., Margolin, A. A., Kim, S., et al. (2012). The Cancer Cell Line Encyclopedia enables predictive modelling of anticancer drug sensitivity. Nature, 483 (7391), 603-607. doi: 10.1038/nature11003
[0481] 29 Forbes, S. A., Bindal, N., Bamford, S., Cole, C., Kok, C. Y., Beare, D., et al. (2011). COSMIC: mining complete cancer genomes in the Catalogue of Somatic Mutations in Cancer. Nucleic Acids Research, 39 (Database issue), D945-50. doi: 10.1093/nar/gkq929
[0482] 30 Silva, G., Poirot, L., Galetto, R., Smith, J., Montoya, G., Duchateau, P., Paques, F. (2011). Meganucleases and other tools for targeted genome engineering: Perspectives and challenges for gene therapy. Current Gene Therapy, 1′/(1), 11-27
[0483] 31 Epinat, J. C., Silva, G. H., Paques, F., Smith, J., Duchateau, P. (2013). Engineered meganucleases for genome engineering purposes. Topics in Current Genetics (Vol. 23, pp. 147-185).
[0484] 32 Szczepek, M., Brondani, V., Buchel, J., Serrano, L., Segal, D. J., Cathomen, T. (2007). Structure-based redesign of the dimerization interface reduces the toxicity of zinc-finger nucleases. Nature Biotechnology, 25 (7), 786-793. doi: 10.1038/nbt1317
[0485] 33 Doyon, Y., Vo, T. D., Mendel, M. C., Greenberg, S. G., Wang, J., Xia, D. F., et al. (2011). Enhancing zinc-finger-nuclease activity with improved obligate heterodimeric architectures. Nat Methods, 8 (1), 74-79. doi: 10.1038/nmeth. 1539
[0486] 34 Perez-Pinera, P., Ousterout, D. G., Brown, M. T., Gersbach, C. A. (2012). Gene targeting to the ROSA26 locus directed by engineered zinc finger nucleases. Nucleic Acids Research, 40 (8), 3741-3752. doi: 10.1093/nar/gkr1 214
[0487] 35 Urnov, F. D., Miller, J. C., Lee, Y.-L., Beausejour, C. M., Rock, J. M., Augustus, S., et al. (2005). Highly efficient endogenous human gene correction using designed zinc-finger nucleases. Nature, 435 (7042), 646-651. doi: 10.1038/nature03556
[0488] 36 Maresca, M., Lin, V. G., Guo, N., & Yang, Y. (2013). Obligate ligation-gated recombination (ObLiGaRe): custom-designed nuclease-mediated targeted integration through nonhomologous end joining. Genome Research, 23 (3), 539-546. doi: 10.1101/gr. 145441.112
[0489] 37 Bogdanove, A. J., & Voytas, D. F. (2011). TAL effectors: customizable proteins for DNA targeting. Science, 333 (6051), 1843-1846. doi: 10.1126/science. 1204094
[0490] 38 Reyon, D., Tsai, S. Q., Khgayter, C., Foden, J. A., Sander, J. D., 8 Joung, J. K. (2012). FLASH assembly of TALENs for high-throughput genome editing. Nature Biotechnology, 30 (5), 460-465. doi: 10.1038/nbt. 2170
[0491] 39 Boissel, S., Jarjour, J., Astrakhan, A., Adey, A., Gouble, A., Duchateau, P., et al. (2013). megaTALs: a rare-cleaving nuclease architecture for therapeutic genome engineering. Nucleic Acids Research. doi: 10.1093/nar/gkt1224
[0492] 40 Beurdeley, M., Bietz, F., Li, J., Thomas, S., Stoddard, T., Juillerat, A., et al. (2013). Compact designer TALENs for efficient genome engineering. Nature Communications, 4, 1762. doi: 10.1038/ncomms2782
[0493] 41 Sampson, T. R., Weiss, D. S. (2014). Exploiting CRISPR/Cas systems for biotechnology. BioEssays: News and Reviews in Molecular, Cellular and Developmenta/Biology, 36 (1), 34-38. doi: 10.1002/bies. 201300135
[0494] 42 Shalem, O., Sanjana, N. E., Hartenian, E., Shi, X., Scott, D. A., Mikkelsen, T. S., et al. (2014). Genome-scale CRISPR-Cas9 knockout screening in human cells. Science, 343 (6166), 84-87. doi: 10.1126/science. 1247005
[0495] 43 Wang, T., Wei, J. J., Sabatini, D. M., Lander, E. S. (2014). Genetic screens in human cells using the CRISPR-Cas9 system. Science, 343 (6166), 80-84. doi: 10.1126/science.246981
[0496] 44 Beard, C., Hochedlinger, K., Plath, K., Wutz, A., & Jaenisch, R. (2006). Efficient method to generate single-copy transgenic mice by site-specific integration in embryonic stem cells. Genesis, 44 (1), 23-28.
[0497] 45 Orlando, S. J., Santiago, Y., DeKelver, R. C., Freyvert, Y., Boydston, E. A., Moehle, E. A., et al. (2010). Zinc-finger nuclease-driven targeted integration into mammalian genomes using donors with limited chromosomal homology. Nucleic Acids Research, 38 (15), e152. doi: 10.1093/nar/gkq 512
[0498] 46 Cadinanos 2007
[0499] 47 Zhang, H., Yea, K., Xie, J., Ruiz, D., Wilson, I. A., Lerner, R. A. (2013). Selecting agonists from single cells infected with combinatorial antibody libraries. Chemistry 8 Biology, 20 (5), 734-741. doi: 10.1016/j.chembiol. 2013.04.012
[0500] 48 Porteus, M. H., Baltimore, D. (2003). Chimeric nucleases stimulate gene targeting in human cells. Science, 300 (5620), 763. doi: 10.1126/science. 1078395
[0501] 49 Rouet, P., Smih, F., & Jasin, M. (1994). Introduction of double-strand breaks into the genome of mouse cells by expression of a rare-cutting endonuclease. Molecular and Cellular Biology, 14 (12), 8096-8106.
[0502] 50 Jasin, M. (1996). Genetic manipulation of genomes with rare-cutting endonucleases. Trends in Genetics, 12 (6), 224-228
[0503] 51 Davis, L., & Maizels, N. (2011). DNA nicks promote efficient and safe targeted gene correction. PLOS ONE, 6 (9), e23981. doi: 10.1371/journal. pone. 0023981
[0504] 52 Fujioka, K., Aratani, Y., Kusano, K., Koyama, H. (1993). Targeted recombination with single-stranded DNA vectors in mammalian cells. Nucleic Acids Res, 21 (3), 407-412
[0505] 53 Khan, I. F., Hirata, R. K., & Russell, D. W. (2011). AAV-mediated gene targeting methods for human cells. Nat Protoc, 6 (4), 482-501. doi: 10.1038/nprot. 2011.301
[0506] 54 Deyle, D. R., 8 Russell, D. W. (2009). Adeno-associated virus vector integration. Current Opinion in Molecular Therapeutics, 11 (4), 442-447
[0507] 55 Benatuil, L., Perez, J. M., Belk, J., Hsieh, C. M. (2010). An improved yeast transformation method for the generation of very large human antibody libraries. Protein Engineering, Design and Selection, 23 (4), 155-159.
[0508] 56 Feldhaus, M. J., Siegel, R. W., Opresko, L. K., Coleman, J. R., Feldhaus, J. M., Yeung, Y. A., et al. (2003). Flow-cytometric isolation of human antibodies from a nonimmune Saccharomyces cerevisiae surface display library. Nat Biotechnol.
[0509] 57 Zhao, A., Nunez-Cruz, S., Li, C., Coukos, G., Siegel, D. L., 8 Scholler, N. (2011). Rapid isolation of high-affinity human antibodies against the tumor vascular marker Endosialin/TEM1, using a paired yeast-display/secretory scFv library platform. Journal of Immunological Methods, 363 (2), 221-232. doi: 10.1016/j.jim. 2010.09.001
[0510] 58 Skerra, A. (2007). Alternative non-antibody scaffolds for molecular recognition. Curr Opin Biotechnol, 18 (4), 295-304. doi: 10.1016/j.copbio. 2007.04.010
[0511] 59 Gebauer, M., & Skerra, A. (2009). Engineered protein scaffolds as next-generation antibody therapeutics. Current Opinion in Chemical Biology, 13 (3), 245-255. doi: 10.1016/j.cbpa. 2009.04.627
[0512] 60 Haan & Maggos (2004) BioCentury, 12 (5): A1-A6
[0513] 61 Koide et al. (1998) Journal of Molecular Biology, 284:1141-1151.
[0514] 62 Nygren et al. (1997) Current Opinion in Structural Biology, 7:463-469
[0515] 63 Wess, L. In: BioCentury, The Bernstein Report on BioBusiness, 12 (42), A1-A7, 2004
[0516] 64 Chang, H.-J., Hsu, H.-J., Chang, C.-F., Peng, H.-P., Sun, Y.-K., Yu, H.-M., et al. (2009). Molecular Evolution of Cystine-Stabilized Miniproteins as Stable Proteinaceous Binders. Structure, 17 (4), 620-631. doi: 10.1016/j.str. 2009.01.011
[0517] 65 Ward, E. S. et al., Nature 341, 544-546 (1989)
[0518] 66 McCafferty et al Nature, 348, 552-554 (1990)
[0519] 67 Holt et al Trends in Biotechnology 21, 484-490 (2003)
[0520] 68 Bird et al, Science, 242, 423-426, (1988)
[0521] 69 Huston et al, PNAS USA, 85, 5879-5883, (1988)
[0522] 70 Holliger, P. et al, PNAS USA 90 6444-6448, (1993)
[0523] 71 Reiter, Y. et al, Nature Biotech, 14, 1239-1245, (1996)
[0524] 72 Holliger & Hudson, Nature Biotechnology 23 (9): 1126-1136 (2005)
[0525] 73 Knappik et al. J. Mol. Biol. 296, 57-86 (2000)
[0526] 74 Krebs et al. Journal of Immunological Methods 254, 67-84 (2001)
[0527] 75 Holliger and Bohlen Cancer and metastasis rev. 18:411-419 (1999)
[0528] 76 Holliger, P. and Winter G. Current Opinion Biotechnol 4, 446-449 (1993)
[0529] 77 Glennie M J et al., J. Immunol. 139, 2367-2375 (1987)
[0530] 78 Repp R. et al., J. Hemat. 377-382 (1995)
[0531] 79 Staerz U. D. and Bevan M. J. PNAS 83 (1986)
[0532] 80 Suresh M. R. et al., Method Enzymol. 121:210-228 (1986)
[0533] 81 Merchand et al., Nature Biotech. 16:677-681 (1998)
[0534] 82 Ridgeway, J. B. B. et al, Protein Eng., 9, 616-621, (1996)
[0535] 83 Marks, J. D., Hoogenboom, H. R., Bonnert, T. P., McCafferty, J., Griffiths, A. D., & Winter, G. (1991). By-passing immunization. Human antibodies from V-gene libraries displayed on phage. J Mol Biol, 222 (3), 581-597.
[0536] 84 Gronwald, R. G. K., Grant, F. J., Haldeman, B. A., Hart, C. E., O'Hara, P. J., Hagen, F. S., et al. (1988). Cloning and expression of a cDNA coding for the human platelet-derived growth factor receptor: Evidence for more than one receptor class (Vol. 85, pp. 3435-3439). Presented at the Proceedings of the National Academy of Sciences of the United States of America.
[0537] 85 Kumar, N., & Borth, N. (2012). Flow-cytometry and cell sorting: an efficient approach to investigate productivity and cell physiology in mammalian cell factories. Methods, 56 (3), 366-374. doi: 10.1016/j.ymeth. 2012.03.004
[0538] 86 Brezinsky, S. C. G., Chiang, G. G., Szilvasi, A., Mohan, S., Shapiro, R. I., MacLean, A., et al. (2003). A simple method for enriching populations of transfected CHO cells for cells of higher specific productivity. J Immuno/Methods, 277 (1-2), 141-155.
[0539] 87 Pichler, J., Hesse, F., Wieser, M., Kunert, R., Galosy, S. S., Mott, J. E., & Borth, N. (2009). A study on the temperature dependency and time course of the cold capture antibody secretion assay. Journal of Biotechnology, 141 (1-2), 80-83. doi: 10.1016/j.jbiotec. 2009.03.001
[0540] 88 Anastassiadis, K., Fu, J., Patsch, C., Hu, S., Weidlich, S., Duerschke, K., et al. (2009). Dre recombinase, like Cre, is a highly efficient site-specific recombinase in E. coli, mammalian cells and mice. Disease Models & Mechanisms, 2 (9-10), 508-515. doi: 10.1242/dmm. 003087
[0541] 89 Horlick, R. A., Macomber, J. L., Bowers, P. M., Neben, T. Y., Tomlinson, G. L., Krapf, I. P., et al. (2013). Simultaneous surface display and secretion of proteins from mammalian cells facilitate efficient in vitro selection and maturation of antibodies. J Biol Chem, 288 (27), 19861-19869. doi: 10.1074/jbc. M113.452482
[0542] 90 Biffi, G., Tannahill, D., McCafferty, J., & Balasubramanian, S. (2013). Quantitative visualization of DNA G-quadruplex structures in human cells. Nature Chemistry, 5 (3), 182-186. doi: 10.1038/nchem. 1548
[0543] 91 Gao, J., Sidhu, S. S., & Wells, J. A. (2009). Two-state selection of conformation-specific antibodies. Proc Natl Acad Sci USA, 106 (9), 3071-3076. doi: 10.1073/pnas. 0812952106
[0544] 92 Gu, G. J., Friedman, M., Jost, C., Johnsson, K., Kamali-Moghaddam, M., Pluckthun, A., et al. (2013). Protein tag-mediated conjugation of oligonucleotides to recombinant affinity binders for proximity ligation. N Biotechno/, 30 (2), 144-152. doi: 10.1016/j.nbt. 2012.05.005
[0545] 93 Cho, Y. K., & Shusta, E. V. (2010). Antibody library screens using detergent-solubilized mammalian cell lysates as antigen sources. Profein Eng Des Sei, 23 (7), 567-577. doi: 10.1093/protein/gzq 029
[0546] 94 Tillotson, B. J., Cho, Y. K., & Shusta, E. V. (2013). Cells and cell lysates: a direct approach for engineering antibodies against membrane proteins using yeast surface display. Methods, 60 (1), 27-37. doi: 10.1016/j.ymeth. 2012.03.010
[0547] 95 Kunert, A., Straetemans, T., Govers, C., Lamers, C., Mathijssen, R., Sleijfer, S., Debets, R. (2013). TCR-Engineered T Cells Meet New Challenges to Treat Solid Tumors: Choice of Antigen, T Cell Fitness, and Sensitization of Tumor Milieu. Frontiersin Immunology, 4, 363. doi: 10.3389/fimmu. 2013.00363
[0548] 96 Liddy, N., Bossi, G., Adams, K. J., Lissina, A., Mahon, T. M., Hassan, N. J., et al. (2012). Monoclonal TCR-redirected tumor cell killing. Nature Medicine, 18 (6), 980-987. doi: 10.1038/nm. 2764
[0549] 97 Holler, P. D., Holman, P. O., Shusta, E. V., O'Herrin, S., Wittrup, K. D., 8 Kranz, D. M. (2000). In vitro evolution of a T cell receptor with high affinity for peptide/MHC. Proc Natl Acad Sci USA, 97 (10), 5387-5392. doi: 10.1073/pnas. 080078297
[0550] 98 Weber, K. S., Donermeyer, D. L., Allen, P. M., 8 Kranz, D. M. (2005). Class II-restricted T cell receptor engineered in vitro for higher affinity retains peptide specificity and function. Proc Natl Acad Sci USA, 102 (52), 19033-19038. doi: 10.1073/pnas. 0507554102
[0551] 99 Kessels, H. W., van Den Boom, M. D., Spits, H., Hooijberg, E., 8 Schumacher, T. N. (2000). Changing T cell specificity by retroviral T cell receptor display. Proc Natl Acad Sci USA, 97 (26), 14578-14583. doi: 10.1073/pnas. 97.26.14578
[0552] 100 Chervin, A. S., Aggen, D. H., Raseman, J. M., 8 Kranz, D. M. (2008). Engineering higher affinity T cell receptors using a T cell display system. Journal of Immunological Methods, 339 (2), 175-184.
[0553] 101 Crawford, F., Jordan, K. R., Stadinski, B., Wang, Y., Huseby, E., Marrack, P., et al. (2006). Use of baculovirus MHC/peptide display libraries to characterize T-cell receptor ligands. Immunological Reviews, 210, 156-170. doi: 10.1111/j.0105-2896.2006.00365.x
[0554] 102 Hinrichs, C. S., K Restifo, N. P. (2013). Reassessing target antigens for adoptive T-cell therapy. Nat Biotechnol, 31 (11), 999-1008. doi: 10.1038/nbt. 2725
[0555] 103 Sadelain, M., Brentjens, R., 8 Riviere, I. (2013). The basic principles of chimeric antigen receptor design. Cancer Discovery, 3 (4), 388-398. doi: 10.1158/2159-8290.CD-12-0548
[0556] 104 Alonso-Camino, V., Sanchez-Martin, D., Compte, M., Sanz, L., 8 Alvarez-Vallina, L. (2009). Lymphocyte display: a novel antibody selection platform based on T cell activation. PLOS ONE, 4 (9), e7174. doi: 10.1371/journal. pone. 0007174
[0557] 105 Melidoni, A. N., Dyson, M. R., Wormald, S., 8 McCafferty, J. (2013). Selecting antagonistic antibodies that control differentiation through inducible expression in embryonic stem cells. Proceedings of the National Academy of Sciences, 110 (44), 17802-17807. doi: 10.1073/pnas. 1312062110
[0558] 106 Zhang, H., Wilson, I. A., & Lerner, R. A. (2012). Selection of antibodies that regulate phenotype from intracellular combinatorial antibody libraries. Proceedings of the National Academy of Sciences, 109 (39), 15728-1 5733. doi: 10.1073/pnas. 1214275109
[0559] 107 Xie, J., Yea, K., Zhang, H., Moldt, B., He, L., Zhu, J., 8 Lerner, R. A. (2014). Prevention of cell death by antibodies selected from intracellular combinatorial libraries. Chemistry & Biology, 2/(2), 274-283.
[0560] 108 Yea, K., Zhang, H., Xie, J., Jones, T. M., Yang, G., Song, B. D., 8 Lerner, R. A. (2013). Converting stem cells to dendritic cells by agonist antibodies from unbiased morphogenic selections (Vol. 110, pp. 14966-14971). Presented at the Proceedings of the National Academy of Sciences of the United States of America. doi: 10.1073/pnas. 1313671110
[0561] 109 Kawahara, M., Kimura, H., Ueda, H., 8 Nagamune, T. (2004). Selection of genetically modified cell population using hapten-specific antibody/receptor chimera. Biochem Biophys Res Commun, 3′/5 (1), 132-138. doi: 10.1016/j.bbrc. 2004.01.030
[0562] 110 Kawahara, M., Shimo, Y., Sogo, T., Hitomi, A., Ueda, H., 8 Nagamune, T. (2008). Antigenmediated migration of murine pro-B Ba/F3 cells via an antibody/receptor chimera. Journal of Biotechnology, 133 (1), 154-161. doi: 10.1016/j.jbiotec. 2007.09.009
[0563] 111 Sogo, T., Kawahara, M., Ueda, H., Otsu, M., Onodera, M., Nakauchi, H., 8 Nagamune, T. (2009). T cell growth control using hapten-specific antibody/interleukin-2 receptor chimera. Cytokine, 46 (1), 127-1 36. doi: 10.1016/j.cyto. 2008.12.020
[0564] 112 Kawahara, M., Chen, J., Sogo, T., Teng, J., Otsu, M., Onodera, M., et al. (2011). Growth promotion of genetically modified hematopoietic progenitors using an antibody/c-Mpl chimera. Cytokine, 55 (3), 402-408. doi: 10.1016/j.cyto. 2011.05.024
[0565] 113 Ueda, H., Kawahara, M., Aburatani, T., Tsumoto, K., Todokoro, K., Suzuki, E., et al. (2000). Cell-growth control by monomeric antigen: the cell surface expression of lysozyme-specific Ig Vdomains fused to truncated Epo receptor. J Immuno/Methods, 241 (1-2), 159-170.
[0566] 114 Kerppola, T. K. (2009). Visualization of molecular interactions using bimolecular fluorescence complementation analysis: Characteristics of protein fragment complementation. Chemical Society Reviews, 38 (10), 2876-2886.
[0567] 115 Michnick, S. W., Ear, P. H., Manderson, E. N., Remy, I., 8 Stefan, E. (2007). Universal strategies in research and drug discovery based on protein-fragment complementation assays. Nature Reviews Drug Discovery, 6 (7), 569-582. doi: 10.1038/nrd231
[0568] 116 Petschnigg, J., Groisman, B., Kotlyar, M., Taipale, M., Zheng, Y., Kurat, C. F., et al. (2014). The mammalian-membrane two-hybrid assay (MaMTH) for probing membrane-protein interactions in human cells. Nat Methods. doi: 10.1038/nmeth. 2895
[0569] 117 Renaut, L., Monnet, C., Dubreuil, O., Zaki, O., Crozet, F., Bouayadi, K., et al. (2012). Affinity maturation of antibodies: Optimized methods to generate high-quality scfv libraries and isolate igg candidates by high-throughput screening. Methods in Molecular Biology (Vol. 907, pp. 451-461)
[0570] 118 Dyson, M. R., Zheng, Y., Zhang, C., Colwill, K., Pershad, K., Kay, B. K., et al. (2011). Mapping protein interactions by combining antibody affinity maturation and mass spectrometry. Anal Biochem, 417 (1), 25-35. doi: 10.1016/j.ab.2011.05.005
[0571] 119 de Felipe P (2002) Polycistronic viral vectors. Curr Gene Ther 2:355-378. doi: 10.2174/1566523023347742.
[0572] 120 Foote, J., Winter, G. (1992). Antibody framework residues affecting the conformation of the hypervariable loops. J Mol Biol, 224 (2), 487-499.
[0573] 121 Massie, B., Dionne, J., Lamarche, N., Fleurent, J., Langelier, Y. (1995). Improved adenovirus vector provides herpes simplex virus ribonucleotide reductase R1 and R2 subunits very efficiently. Nature Biotechnology, 13 (6), 602-608.
[0574] 122 Kim, D. W., Uetsuki, T., Kaziro, Y., Yamaguchi, N., 8 Sugano, S. (1990). Use of the human elongation factor 1 alpha promoter as a versatile and efficient expression system. Gene, 91 (2), 217-223.
[0575] 123 Holden, P., Keene, D. R., Lunstrum, G. P., Bachinger, H. P., 8 Horton, W. A. (2005). Secretion of cartilage oligomeric matrix protein is affected by the signal peptide. J Biol Chem, 280 (17), 17172-17179.
[0576] 124 Sadelain, M., Papapetrou, E. P., 8 Bushman, F. D. (2012). Safe harbours for the integration of new DNA in the human genome. Nature Reviews Cancer, 12 (1), 51-58.
[0577] 125 Sanjana, N. E., Cong, L., Zhou, Y., Cunniff, M. M., Feng, G., 8 Zhang, F. (2012). A transcription activator-like effector toolbox for genome engineering. Nat Protoc, 7 (1), 171-192. doi: 10.1038/n prot. 2011.431
[0578] 126 Falk, R., Falk, A., Dyson, M. R., Melidoni, A. N., Parthiban, K., Young, J. L., et al. (2012). Generation of anti-Notch antibodies and their application in blocking Notch signalling in neural stem cells. Methods, 58 (1), 69-78. doi: 10.1016/j.ymeth. 2012.07.008
[0579] 127 Martin, C. D., Rojas, G., Mitchell, J. N., Vincent, K. J., Wu, J., McCafferty, J., Schofield, D. J. (2006). A simple vector system to improve performance and utilisation of recombinant antibodies. BMC Biotechnology, 6, 46.
[0580] 128 Reyon, D., Tsai, S. Q., Khgayter, C., Foden, J. A., Sander, J. D., Joung, J. K. (2012). FLASH assembly of TALENs for high-throughput genome editing. Nature Biotechnology, 30 (5), 460-465. doi: 10.1038/nbt. 2170
[0581] 129 Van Der Weyden, L., Adams, D. J., Harris, L. W., Tannahill, D., Arends, M. J., Bradley, A. (2005). Null and conditional Semaphorin 3B alleles using a flexible purohtk LoxP/FRT vector. Genesis, 44 (4), 171-178
[0582] 130 de Felipe, P., 8 Ryan, M. D. (2004). Targeting of proteins derived from self-processing polyproteins containing multiple signal sequences. Traffic, 5 (8), 616-626.
[0583] 131 Raymond, C. S., & Soriano, P. (2007). High-efficiency FLP and PhiC31 site-specific recombination in mammalian cells. PLOS ONE, 2 (1), e162. doi: 10.1371/journal. pone. 0000162
[0584] 132 Kranz, A., Fu, J., Duerschke, K., Weidlich, S., Naumann, R., Stewart, A. F., Anastassiadis, K. (2010). An improved Flp deleter mouse in C57Bl/6 based on Flpo recombinase. Genesis, 48 (8), 512-520. doi: 10.1002/dvg. 20641
[0585] 133 Szymczak A L, Vignali D A (2005) Development of 2A peptide-based strategies in the design of multicistronic vectors. Expert Opin Biol Ther 5:627-638. doi: 10.1517/14712598.5.5.627
[0586] 134 Chapple, S. D., Crafts, A. M., Shadbolt, S. P., McCafferty, J., and Dyson, M. R. (2006). Multiplexed expression and screening for recombinant protein production in mammalian cells. BMC biotechnology 6, 49.
[0587] 135. Zhao, Y. et al. Multiple injections of electroporated autologous T cells expressing a chimeric antigen receptor mediate regression of human disseminated tumor. Cancer Research 70, 9053-9061 (2010).
[0588] 136 Szymczak, A. L. et al. Correction of multi-gene deficiency in vivo using a single ‘selfcleaving’ 2A peptide-based retroviral vector. Nature biotechnology 22, 589-594 (2004).
[0589] 137. Li, Y. et al. Directed evolution of human T-cell receptors with picomolar affinities by phage display. Nat. Biotechnol. 23, 349-354 (2005).
[0590] 138. Zhao, Y. et al. High-affinity TCRs generated by phage display provide CD4+ T cells with the ability to recognize and kill tumor cell lines. J. Immunol. 179, 5845-5854 (2007).
[0591] 139. Madura, F. et al. T-cell receptor specificity maintained by altered thermodynamics. The Journal of biological chemistry 288, 18766-18775 (2013).
[0592] 140. Pierce, B. G. et al. Computational design of the affinity and specificity of a therapeutic T cell receptor. PLOS Comput Biol 10, e1003478 (2014).
[0593] 141. Sebestyen, Z. et al. Human TCR that incorporate CD3zeta induce highly preferred pairing between TCRalpha and beta chains following gene transfer. J. Immunol. 180, 7736-7746 (2008).
[0594] 142. Roszik, J. et al. T-cell synapse formation depends on antigen recognition but not CD3 interaction: studies with TCR: (a candidate transgene for TCR gene therapy. Eur. J. Immunol. 41, 1288-1297 (2011).
[0595] 143. Cohen, C. J., Zhao, Y., Zheng, Z., Rosenberg, S. A. Morgan, R. A. Enhanced antitumor activity of murine-human hybrid T-cell receptor (TCR) in human lymphocytes is associated with improved pairing and TCRICD3 stability. Cancer Research 66, 8878-8886 (2006).
[0596] 144. Huovinen, T. et al. Primer extension mutagenesis powered by selective rolling circle amplification. PLOS ONE 7, e31817 (2012).
[0597] 145. Cribbs, A. P., Kennedy, A., Gregory, B. & Brennan, F. M. Simplified production and concentration of lentiviral vectors to achieve high transduction in primary human T cells. BMC biotechnology 13, 98 (2013).
[0598] 146. Oelke, M. et al. Ex vivo induction and expansion of antigen-specific cytotoxic T cells by HLA-Ig-coated artificial antigen-presenting cells. Nat Med 9, 619-624 (2003).
[0599] 147. Wolf I, M. Greenberg, P. D. Antigen-specific activation and cytokine-facilitated expansion of naive, human CD8+ T cells. Nature Protocols 9, 950-966 (2014).
[0600] 148. Lipowska-Bhalla, G., Gilham, D. E., Hawkins, R. E. & Rothwell, D. G. Isolation of tumor antigen-specific single-chain variable fragments using a chimeric antigen receptor bicistronic retroviral vector in a Mammalian screening protocol. Hum Gene Ther Methods 24, 381-391 (2013).
[0601] 149. Kelly, R. J., Sharon, E., Pastan, I. Hassan, R. Mesothelin-targeted agents in clinical trials and in preclinical development. Mol. Cancer Ther. 11, 517-525 (2012).
[0602] 150. Atanackovic, D. et al. Surface molecule CD229 as a novel target for the diagnosis and treatment of multiple myeloma. Haematologica 96, 1512-1520 (2011).
[0603] 151. Bund, D., Mayr, C., Kofler, D. M., Hallek, M. & Wendtner, C.-M. Human Ly9 (CD229) as novel tumor-associated antigen (TAA) in chronic lymphocytic leukemia (B-CLL) recognized by autologous CD8+ T cells. Exp. Hematol. 34, 860-869 (2006).
[0604] 152. Tiede, C. et al. Adhiron: a stable and versatile peptide display scaffold for molecular recognition applications. Protein Eng. Des. Sel. 27, 145-155 (2014).
[0605] 153. Maresca, M., Lin, V. G., Guo, N. & Yang, Y. Obligate ligation-gated recombination (ObLiGaRe): custom-designed nuclease-mediated targeted integration through nonhomologous end joining. Genome Res. 23, 539-546 (2013).
[0606] 154. McVey, M. Lee, S. E. MMEJ repair of double-strand breaks (director's cut): deleted sequences and alternative endings. Trends Genet. 24, 529-538 (2008).
[0607] 155. Nakade, S. et al. Microhomology-mediated end-joining-dependent integration of donor DNA in cells and animals using TALENs and CRISPRICas9. Nat Commun 5, 5560 (2014).
[0608] 156. Chiche, L. et al. Squash inhibitors: From structural motifs to macrocyclic knottins. Current Protein 8 Peptide Science 5, 341-349.

1. A method for identifying a locus in a genome of a eukaryotic cell, said locus being a candidate for insertion of binder sequences, said method comprising:
a. providing a landing pad sequence;
b. introducing the landing pad sequence into the eukaryotic cell;
c. randomly integrating the landing pad sequence into the genome of the eukaryotic cell via transposon-mediated integration;
d. selecting a clone having a landing pad sequence integrated into its genome.

2. The method of claim 1 comprising the further steps of:
e. screening for single-copy integration;
f. identifying the locus.

3. The method of claim 2 comprising the additional steps of:
g. integrating a donor DNA sequence comprising one or more transgenes encoding a binder at the landing pad sequence;
h. screening for integration of the donor DNA.

4. The method of any one of claims 1-3, wherein the landing pad sequence comprises a recognition sequence for a site-specific nuclease, preferably wherein the nuclease recognition sequence is a meganuclease recognition sequence, a zinc finger nuclease recognition sequence, a TALE nuclease recognition sequence or a nucleic acid guided nuclease recognition sequence, preferably a meganuclease recognition sequence, preferably a I-SceI meganuclease recognition sequence.

5. The method of claim 4, wherein step g of integrating the donor DNA into the cells comprises providing a site-specific nuclease within the cells, wherein the nuclease cleaves the recognition sequence comprised in the landing pad.

6. The method of any one of claims 3-5, wherein step h of screening for integration of the donor DNA comprises screening for display of the one or more binders encoded by the donor DNA.

7. The method of any one of claims 3-6, wherein the donor DNA further comprises homology arms to increase integration efficiency.

8. The method of any one of claims 1-7, wherein the landing pad sequence and/or the donor DNA sequence comprise a selectable marker.

9. Use of the locus identified in the method of any one of claims 1 through 8 for building a library of eukaryotic cell clones containing DNA encoding a diverse repertoire of binders.

10. An in vitro library of eukaryotic cell clones that express a diverse repertoire of at least 10\hat{ }3, 10\hat{ }4, 10\hat{ }5, 10\hat{ }6, 10\hat{ }7, 10\hat{ }8 or 10\hat{ }9 different binders, each cell containing recombinant DNA wherein donor DNA encoding a binder or subunit of a binder is integrated in at least a first and/or a second fixed locus in the cellular DNA, said locus or loci being identified by a method according to any one of claims 1-8, preferably wherein said locus or loci are in a gene selected from an NLN gene, a TNIK gene, a PARP11 gene, a RAB40B gene, an ABI2 gene, an RNF19B gene, a PKIA gene, or an FTCD gene, more preferably wherein the locus or loci are in an NLN gene, a TNIK gene or a RAB40B gene, most preferably in an NLN gene.

11. An in vitro library of eukaryotic cell clones according to claim 10, wherein the locus or loci are in an intron of the gene, preferably wherein the locus or loci are in an open chromatin region of the intron and/or wherein the locus or loci are in an enhancer region of the intron.

12. An in vitro library of eukaryotic cell clones according to claim 10 or 11, wherein the locus or loci are in NLN-207 intron 1, 2 or 6 of the NLN gene.

13. A binder identified from a library according to any of claims 10-12.

14. A method for producing a library of eukaryotic cell clones containing DNA encoding a diverse repertoire of binders, comprising:
providing donor DNA molecules encoding the binders, and eukaryotic cells;
introducing the donor DNA into the cells and providing a site-specific nuclease within the cells, wherein the nuclease cleaves a recognition sequence in cellular DNA, wherein the recognition sequence is in an NLN gene, a TNIK gene, a PARP11 gene, a RAB40B gene, an ABI2 gene, an RNF19B gene, a PKIA gene, or an FTCD gene, preferably in an NLN gene, a TNIK gene or a RAB40B gene, more preferably in an NLN gene, to create an integration site at which the donor DNA becomes integrated into the cellular DNA, integration occurring through DNA repair mechanisms endogenous to the cells, thereby creating recombinant cells containing donor DNA integrated in the cellular DNA; and
culturing the recombinant cells to produce clones, thereby providing a library of eukaryotic cell clones containing donor DNA encoding the repertoire of binders.

15. A method according to claim 14, wherein the recognition sequence is in an intron of the gene, preferably wherein the recognition sequence is in an open chromatin region of the intron and/or wherein the recognition sequence is in an enhancer region of the intron.

16. A method according to claim 14 or 15, wherein the recognition sequence is in NLN-207 intron 1, 2 or 6 of the NLN gene.

The application's sequence listing, which the Patent Office published only in electronic form, follows.

SEQUENCE LISTING (77 sequences)

SEQ ID NO: 1 - DNA, 149521 bp, Homo sapiens
  source 1..149521: mol_type = other DNA
aggcgccggcgtggagctgccgcacgtgggagggcgctggccaggcagccactgtggcctctgcggctaggccggctcgagactcccgggcgcccaggcgctgccgcccgcctcgccgccccacgccgaaggaccacgcgcccgccgccgccagcctctcagcgctcccatgatcgcccggtgccttttggctgtgcgaagcctccgcaggtacctccagcgcgcgggttaaccttggccgtgggcagggcggggtctttcgccgtgtggtgcctggagcccggacccaccccttcccgaccgcgcctctccgacgctcccgggacgcaccctccccgcggcttgcaaggtggacccctgggggacacctggcgcggccacctggggccacctttcccgcctccgctccctcgggaggacgtccattcctctttgtttgggactgcctcagccgcagtcagcgaggctggtcacagacgcggcccaaaatgaatgcaaatagtttggataagaaaatcatttcacgttcaatcccaatgcagaactacagacctgtcattaaaagtgccgcagctgtggactcagaacaattgtgtttgctcctcgcgcccattattagcattccaatcgtttaacatccacccgagatgaaacctctttggtggtgttgcttgtttccgtccatgctctctgacttccttttttattttcctcctccccataaaacaaacattctgcctcttgccggtgcaaattgacttggcccaaaatggagaaaatgatcgcttggacacggctttgggcagcctgagctgctgttttggattgcttcctagccctctaaccacaccccactgcaacagaccagtagcaagatggtgagggaattaaattctttgcacggatgcgctggttttcggaaacaatgccgccaccatccccgtttccaaatctgcccagaactgtaaatccaaatgaagattcaacagaataaagaaaatgtgtgcttcttgctagctatcaacaaaactactttgtaacatgtcagcatttaagctttctacagttcccttttgcacattgccactcgtctgtgtggatggagctttgtgttgctcagtccgtagagttagggagcaggcaggcgacagtggttaattacaaagagttaatgtggtgattggtgaccatatttcagcctgtcgttttttgctagtctccaggctgcaatcgatatagctgtcaaatgaagttataccaagaaatgaagacttcacataatgcaggggtgagaggagggaataaatcttcatataagagcaattctcggccgggcgctgtggctcatgcctgtaatcccagcactttgggaggccgaggcgggtggatcacgaggtcaggagatcgagaccatcctggctaacacggtgaaaccccgtctctactaaaaaatacaaaaaattagccgggcgtggtggcgggcgcctgtagtcccagctactcgggaggctgaggcaggagaatggcatgaacccgggaggcgaagcttgcagtgagccgagatcgcaccactgtactctagcctgggcgacagagcaagactccgtctcaaaaaaaaaaaaaaaaaaaaaagaacaattctcaaactttttattctcaggacccctttacctttcaaaaattaccgtggacctaagagcttctgtttgtgtggtatatctgtctatatttaccatattagacattaaagctggaaaaaaattaaagtagttgttaatttacaaaactaataaataggctaggtgcataaatagtgattttaatgaaaaataactattttccaaaccaacccccccgccccccaatcagtgagaagattaacattgtggggttttttcccttttttttaaaattgtggtaagatataacaaaatttaccattttgataatttttaagtgtacaattgagaggtacagccaacaccactgtccatctccagaacttgtcatcatcccaaactgaaaccctgtacctattacacaataactgcccattacttcctcccccaatccctggttaaccattattttttctctatgaatttgagtatttcaggtcccttatataagtggaattagacaatatttgtccttttgcgtctggtttatttagtatagcgtttttaaggtttattcgttttgaagcatgtgtcgggatttcctttttaaaactgaataatatttcattgtatgtatataccacattttgtttatccatttgtcagtggacatttgggttgcttccaccttttggctattgtgaatactactactatgatcattaatgtgcacatgtctgtttgaatccctgcttttaattctttgggatactgtatgtacctagaagtgaaaattgctgagtcataggatagtactatgtttagtttttgaaaccatactgttttcttcagtggctgtaccatttttacattcccattggcagtacctaaggattccaatttctccacatcatcatcagcacttatttcctggttttgataacagttatcctaggagtggcattgtttcttttttttttctttttttttttttttgagacagagtctctctctgtcgcccaggctggaatgcagtggcgctatctcggctcactgcaagcgccgcctcccgggttcacgccattcccctgcctcagcctcccaagtagctgggactacaggcgcccgcaaccacgcccggctaattttttttttttatttttagtagagacggggtttcatcctgttagccaggatggtctcgatctcctgacctcgtgatccgcctgtctcggcctcccaaagtgctgggattacaggcgtgagccactgcgcccggcagaagtggcactgtttcgcatttttgcaaaactaatgtgtgacataatagaaggtaactggattcttatgtctgcctctgcatttaagctgctgcactgtttcattttggtttaagatgaagaaaatcccacctcacagtcatatgaagttggaaagaagaatattttaatagctttttaaagataatcatggatgttctttgatatcacatcaaagtttgacaaatcgtagctttttaaaggttagttacaaagtggaatttgaaactatatcaatgtacttgttttacactgttacattaatatccaatggtgtaccttacactttgaatggatgttgaatccatgcctgttttttaaaacattaagcataagtccttcggaaattttagtggttcactgtgttatacagttcttcctaatgttgacatatttcattatacagtatcaaacaatcactttccttaatgtcttcctatttagtcggaaaagtcttcaagtattgggaagctgtcaagctcacagtggcagataggattttccaaaattctagttttcacttgaaagctagaattttatcattggtaacacaaactgtcagttgttttacttgaagtgacaatctcactttgttacatttttgacagaatttctgccacatacttaagtctgaataaccctggtttgtctgtcagtagtttttttctggtaaaaatggtgttccatgggctgggcacggtggctcacgcctgtaatcccagcactttgggaggccatggcaggtggatcacgaagtcaggagatcgagaccatcctggctaacacggtgaaaccctgtctctactgaaaatacaaaaaattagccgggcgtggtggcgggcgcctgtagtcccaactactcgggaggctgaggcaggagaatggcgtgaacccggaaggtggagtttgcagtgcgccgagattgtgccactgcactccagcctgggcgacagagcgagactccgtctcaaaaaaaaaaaaaaaaaaatggttttccatgaaaaaaatctatttcagctcacagttcaaccaattgcaaaagtgcttttgatttgggcaaccaaatcctcaggacaacccttatactcaggtacacagcagaaatgctttgtgtgtacttggtcacatataactcaaaggtagagatttaataaaaattcatactttttaccatttcattaaggatattctaaaatgaaattgacattatttttagcctgagtgcatggcaatgaaaaatatagctactagtatagtttggtgtcattgcctcaatttgtgctgaagtaccaacagtattatccaccattccttttcgccatcagtgcaaatgttcataaagtaaaaaggataaataatgtcttagtattgttatgaaagatttttaacctcacagattccttgaaagtgtctcaggaacccctccccatacctctacctttaaggtttgtggactacattttgagagctgccgatatgtggtattagattctttgtttatgcatggaagaaaataaatatactaatagccaaaaaattattaccttgttagaagctaccataaatatattaactaatttgttacataagggcatatcttacagttaatcatcatatatggtagtccttaacccagggcttccttgacttaatcacagaatctgctctgtttcaaaatcagtatcttccaaaagagttcatattagacaacatggaggaccccctgtgttctcctgtttttcctgtttcctctgacacttgggagttcattttagtgttatggagtaactaggcttttgcctaactgacttacagtttccattgggttttcttgttggcagagctgctatatccccttcccaaggccagcttccagctaggatcattgattggggtgttcagccaacttcttgggaataagtggactgagaatctggagtttggattatagttgctgttcaattcactttgtgaccttaaaaaaatcactcactcccttggacctctttcaagttatgtacctatgtatgtatgtattttagagacaaggtctcactctgtcatccaggctgaagtgcagtggggcatgatcatggctcactgcggtctcaaactctggtttcaaacaatcctccctgcctcagccttctgagtagctgggactacaggcgctcaccaccatgcccagctaatttgaaaaaattgtttgtagagataggatcttgctatgttgccgaggctagtctagaattcctggccacaaatgatcctcccatctcaacctctgaaagtgctgggattacaggagtgtactatcatgcctggcccaggttccttatattgtaaaatgaaaaggactagactaaataatagctaaggccttaaaaaaaaaacaaaaagcaaaaaacctctatattgccatagcaaaccaggagaattcctcctcctacctcagattgtacagcatgtgacccaagcaaagcctaatgtatattatagaataagagggatgagtgacatggtcaaagaaacaaacgagaaggttgactcaacaatatttagccgaaacaatagctgtaatagcctagcttcctcttgcaattagaaaagacagcttggtttgttttttggtttttgtttttttgagacagtctcgctctgttgcccaggctggaatacagtggcatgatctcggctcactgcaacctctgccttctgggttcaagcaattatcctgcctcaggctcctgagtggctgggattacaggtccccacaaccacgcctggctgattttttgtatttttagtagagctggggtttcactatgtgggcctggctggtcttgaactcctgacctcaagtgatctgcccacctcagcttcctaaagtgctgggattataggcgtgagccactgcacctggcctaaaaaacacagcttggttttttaaaatgatgacagcaatgcgtgttcattattgaaaacttagcaagtaatgacaagcaaaagaaaatattaaatatatatataatccagccacctggaacagccaattcttaacagctttcaaaatttcctctatgaacagactttctttttataaatatgatattgttattcttttataatttttaatattatacaaacatcccctaaaatataaatagctataatatattccttttggggatgtatgcaatttgattaatatacgcctttagaaatgtcaactattcccaacttcctgcaatgagtaatagtgcttggataaacattcctattgtccttttccaaatctttagttattttcttagtataaattcttacaaatggaatttgtacatcaaagggcatgcatacctttcaggtctttggtacttatcatcttattctattctaaaaactttctcccaaattataaccttaccaggtgagtaagtaaatgctggtttcctatactgttaccaacattgagcattttaattttttttatccttaccagtttgataagtggaaatttctcttattataatttgcattttcatacatttttggaaggtttattcagtgagtataattcctaaacaaaaattcaggagttgtggtctggaaaccaaaaagttatttgttgtctgatgtgaaaatttatttatatggaaaatcttagaaagtcagacaaattcaattacagttttcttggtgtttttgtttgtttgtttgagacagagtctcacttggttgcccaggctagagtgcagtggcatgatcatggctcactgcagcctcgacctcccgggctcaaacgatcctcccacttcagcctcccgagtagctgggactacaggtgtttgccaccacacccggctaatctttgtatttcttgtagagacagggcttcgccatgttgcccaagctggtctctaattcctgggctcgagtgatctgcccgcctcaaccttccagagtgctgggattacaggcatgagctactgggcccagcctaaattacagttattaataaacttaacaatatttacaggtctaagtgtaattaaataaaattgagattattcctctaaaaccagtaggcataatctccaaaatgttaagagaacagtattggggaaaaaaatctagtaaagaaagggttttttaagttaaagtatcaagagctaggttgacattatttgtacaaatggatttggttataaaataggttttcttttctttttttttttttttttttttttaggatggagtcttgcactgttgcccgggctggagtgcagtggcacgatcttggatcactgcaacctccgcctcctgggttcaagtgattctcctgcctcagcctccggagtagctgggattacaggcacctgccaccacgcccagctaatattttgtatttttagcagagacggggttttaccatgttggctaggctggtctcgaactcctgatctcatgattcacccgcgtcggcctcccaaagtgctgggattacaggcgtgaaccaccgtgctccgccgaggattgatttctttcttttttgtttgtcctttaaccctggttttggtcagaagcaacctggttctttctcagagttaaacattatcacctctttggttaagacaaagcacaggacttacttgggaagaatcccctgaattaaagatatgaagaaccaaggaaactgatgtgtattgaatacatatgtaaatgccaagctgccgcattgcaaagtgcatgtagcatcatagagtcgactatataaatctagaaacagctcgcctgagtttgaatgctggttttgccactgactagcattgtgatcttaggcaagaatacttaagttctccgtatctgtttcctcctcagtaaattgataattgattggctgatttcttcattcaccaaatatttattgtctattatatgcgaaatagtattcttggtctggggatatagcaatgaacaaagcagataaaaatctttgcattaatggaacttacattccagtgggagagacaactaaggaaaatataaagtaagttagatgggaaaatgtgctgcagagcaaaagtaaaatgggaaaggggaatgctcagtaccgataggaaggaaattgtagagtcaacaggaaaggctaccaagaaagtgatattaatacttgagtaatgatctaagagaaatgagcagttgtgctatgtgaatacctgaggcaggtcattctaagcaggagaaacggcacacaccaaggctctgaaagcagggctatgcctggtgtttttgagaaagtaaagagaccattgtgactagcatggaataaatgtcaggcaagtaagtaggagatgagacagggaaaaattggactcatccttttttttctattttcttctttttttttttttgttttattcgtttgtttttagatggagtctcactctattgctcgggctagagtgcaatggcgcaatctcagctcactgcaacctcctcctcctgggttcaagcaattctcccacctcagcctcctgagtagctgggattacaggcacccgccatcatgcccagctaatttttgtattttttgtagaaacaggggttcaccatgttggccaggctggaactcttgacctcaagtgacccacctgcctctgcctcccaaagtgctgggattacaggcgtgagccaccgtgcctggcctgtactcaccttttaagattgaaacaaatatagaacactttgaacattgcctggttatatccattcctattaccacaaaaatgctgtataacaaactgaatttcagtggagtacaatgatcaatgtttatttttgctgacaaatctagattttggctgggcagtttttctgatcttaactcattcatgctccttcagtcagccatgggttgtgtaggcagctctgctgatctctgctatcctctctcacatgtttggtgatgtaggatggccacagctggggctatttggccctctttcctgtgacgtctcgtcctccaagaagccacctctggcttgttctcatgtcagtggcagggttccatgagagagtggaaggcagttggaactggaacctcattagctctgccacattctactggtcaaagcaagtcacaaggctagcccagattcaagaagtggggaaacagactctatctcttgatgggtagaacagcaaactcacattgttaagagacatagactcatagcaggtagaaaattgaggccatgttagttatcagtctaccacatcggcacataataaaatctcgagaaatattagttactgtttttacttgtgtgaattgcctagttttattttgggatttttaaaattaggattattactttgtaagagcccctcatagatgtttcagttgtttttgatctttgaacttttggggtagattattgttgctttttgcttttttgctttatccctacaaaagtttaaatttttatacagtcagaaatatcagtcttttcctttatgatttctgcctttggtctcattcctagaaagtccttctccaccccaagattatgtattttaaaaatcacctacattttcttttttttttttttttttttttttttcagacagagtctagctctgtcacccaggctggagtatagtggaacaatctcatctctctgtaacctctgcctcccagtctcaagcagtcctcccacgtcagccttccaagtagttgggactacaggtgtgagccaccacacctggctaatttttgtattatttgtagagacaaggtttcaccatgttgcccaggctgatctcaaactcctgggctcaagcaatccttccacctcagcctcccaaagtgctacgattacaggcatgagccaccacacccagcatctacattttcttctagtacttttatgtttcatttttcacacttaaaccctttatctatcatgagggctgacttttttaaaaagacttcttcaaattattgagtgaaacaaaaaggaaatcaacaccgaaactgcaaaactgcaagaagtataaaaggaagtccagcttatgaaatctggatttcccgttcaccatagcttacattagaaagactctgcccagagggatggcccgggccagatgctacagagagagacatgcagggagctagttagtcaggggttcagatctagggagggtgcatttgtgaattcctttttaggaagtgtgtttgaagttaatatgatgaaacttacacttcatatagaggagagtatgaaagaagggaaagtgcatcaaacctgtgcgtttcacagtagaagctccgtcctcacagcttagtaaacaccaatgatcctgtctctaattctctgtctgtaaaaggttcttttgaaccccaggaaaagtagttgacatgagaaaagcgtgcttcttggacagaggtgagggagtaggcaggagagtggtataaagtgataggtggtttgcagacgcgggcacgtcagggaacctttgcagacaggtggccctagctgatgtccctagaccttgctcagttgagttctttgtgcacatctcccactgggctcctctggcccagagatgaggttgtctgctgaaagatgcagtaaagaggctttaaagattttgtggccttgaaccaatcacacaagcaaggctgaaaggactgagcctaaaatggagctgcccctgaatgatctgagtcttcatcaggcagcaccttgcacacagaccatcatctgatgatgggaacaaacttgtgtttgggtgaaacaggcttccccattgcagttactataacacctgtgtggtagtaaggtgcagaattactcaatgcccacttcaagtttaccattgagatgatttcccacccccctcctctaactggcaccattgcccataactaatttcttgctctccccaggtgcctcaagaacctcttgggggcctttatattctgtcatgcttacctagctgatcgggacatggagtgtctgtcttagtaaccaagcctcagtcagctaaaggagctgcatctgattcatatcctaatgtggaccaccaatcttgagccccttggagctctgctagagaaagttgctgctactctcgagaccctcacgttaaaggactgtcagatccaggactcccaactcaggctcctcctgcctgccctgagccactgctcccagctcaccaccttctactttcatggaaacgagacctccatgaatgctctgaaagacctgctgtgtcacacaggcgggctgagcaagttaggcctggaattgtatccttcccatctggagagtcttgacaacaggggtcatgccaattgggagatccttgccccaattcgggctgagctgatgtgtacagtcagggaagtcaggcagcccaagaggatcttttttggtcccgtcccctgcccttcctgtggctcatggccatctgagaaagtggacctccatctttgctcttagggaaggcctgattagtgggatggatacgctttcttctggacccttgggcactaaaatctaggacacaggtgcttttttttttttgatggagtctcgctctgtccctcaggctgaagtgcagtggcacaatctcagctcactgcaacttccacctcccaggttcaagtgattctcctgcctcagcctccctagtagctggtgttactggcatgcaccaccacacccaactaattttgtatttttttttcttttttttttttgagacggagtctcgctctgtcacccaggctggagtgcactggcacgacttcggctcactgcaacctctgcctccagggttcatgccattctcctgcctcagcctccagagtagctgggactacaggtgtccaccaccacacccagctaatttttggtatttttagtagagtcagggtttcaccaagttagccaggatggtctcaatctcctgacctcgtgatccacccgcctcggcctcccaaagtgtaatttttgtatttttagtagagacagggtttcacgatgttggaggaggctggcctcaaactcctgacctcaagtgatctgactaccttggccttccacagtgctgggtttacaggcatgagcagcctggcccggtcaggtgcatcttaaaggaagcacacggtcatgtgtttcaggcacgtgctgactgtgagtggaaaaacaaaggtgactcagctgggggcagaactgggtgaaaatgctgacttggcatcaataaagccttcagggacctgtttcctagactcagaaatggaacctgaagttctagaatgatgcaggagttaccctcgcacggatggttatttaaaaatgtcaaaaataaatggaacctgaatggaaaaaaaaaaaaagaaagactctgcccattctgcccactctgagattgtctatgcttcctgtttggcattcaagaggaagtcctcatatttcccagccatattttgctggtatctttaatatttaatcccacttgtggtcaacaccgaaaggaaaattctatttctgcctcacatctcaggtggagttgtagtgactgaaataatcacaggttgatgaagcctgcttgctacaatgtataaggtccatactgtcagggctacatagatctaactattctaacactgagatttatacatctatacattatttttattctcataggaattctttttaaggtttcgtagctttctcctctgccaagatacaaaatagggaaccacaaattatttatttaaaaaagaaatagatgaatgatattagattccaactaccaattggacagctcctgaggtctcacagtcagccacttttttatcttataagtgatatggtttggctgtgtccccacccaaattgaatcatgaggcagttacccccatgctgttctcatgatactgagttctcacaagatctgatggttttataaggggctttttcctctttgctcagcacttctccttcctgccaccacatgaataaggaggtgtttgcttccccttctgccatgattctaagtttcatgaggtcgccccagccatgctgaactgtgaatcaattaaacctgtttcatttataagttacccagtcttgggcatttcttcatagcagcatgagaatggactaatacaataaatacttattgaacacctattatgttgttgaatctcaatatcaccttttcctaaattgacggaattcccctggcttgcttttttgccattgttctttgcctcagtgtcaccatttacgcaagtccaaagcctaggagccattccttgcttttttctctatttcctttaccttttccaccaacaccaagtcctggatagtcttcacattctttctcctttctttgttcccagtatcaccatcataatccaaatcttcctcatcatgagtcccagcatcaatttttgcttaccactaatatattttccttatgaaaatagagatctttaggaactacaaatgtgacatgtcatacttcagtttgcaatttttctttacttgtcattaaacaatcaaaactctcttgtggtttagaaatccctatacagtctgacccctgtgtagctctcccagcttctcctctcactcagtgaactcaatgcttcagccagagagtttatgtccttatctcctggccttaaattaacataagctgatctcttatttggaacattcttttctttctctcccatttccagagcctaatacttattcatttatcttaagagttatgaaatattatacacaaaaaatgtaatgcatatacgtatatacatgtgactaaaaggatgaaaaatgtgtcaatatataaaatgatatttctagtatgaaaaatatatctatatgtaaaatgatatttctagtaccgttgaagttccttgagtgcccccttcaaccatgtccctttcctcataccagagataaccacagtcttgaattttgtaattgctgtcctcttgcttttctttataaacattacaacaaatgtatatttccctaaacaacatatgatttagttttgcataatgaaactagtttcacatggatatggttcatttttactgttgtaagatatttcattgtgtgactattccaaaaatttactttttattttgtcaatgaatatttgggcttccattttcttgatattacaagcaatattgctatgaatattcttataatgtctcctgatacatatgtgtaagagtatgaatttaagagaacaattactaggttgtaggatgtacattctcaactttaccaaataatgcccaattctttttccaaagtggttatactaatttacttccttctctccatatagtattcatgagtagccattgatccactgtccttagcagctcttgttgttgtcaagccttttgccaatccaatggttgtaatggtattacttggcttttatatatatttgctgtgttactaatgagtttgaacatgttttcgtgtttctttgccatttgtattttgtgcctgtttatgtcttttgcccattttcctgagttatctttttcatattgaatttacactctacagtatttatacattttagatattgttcacttgttttccagtattcaaaaaacatgactagtcatggtggctcacgcctgtaatctcaacactttgggaggctgaggcaagagcattacttaagcccggaagtttgacacctgcctgggctatataggaacaccctgtatctacaaaacattaaaaaaaaaattagctgggcatagtggcattcatctatggtcccagctactcggaaggctaaggtgggaggattgcttgatcctgggaggtcgaagctgcagcgagccatgatcatgctgctgcactccagcctatgcgacaaagggagactctgtccagcctatgcgacagagggagactgtctccaaaaaaatatgtatatttaatctgtgtttaatctgtacaagccactgagctaaactctaagaatacagctgtggataagacagaaactgctcctgccctcatgggtttatcccctcacttaaagggggtcaaaaagtaaactaataaatctctaaactaataaatctctaaatggtaacatcatcttagctttgtactttctgagggtgaagttaccagacccctactaaattctttccccctgaatcctgtattaatacttccatagtacaaacattattattaataatgtttttcttcaccactagttgacaagttttctgaaatcagcagcctatttttttgtttttcatttctgtacctccactacttaacatggtcattacataagggatgcaaaataaatatattcattgaatggatgaatgaaaatatgtcattactaataataactgaaaattcagtgttcactattgatatctagggagtataggtctagatctggcattttgatactgacaattacaggtataactttcagtagaaagtagatatttcaagccctatataaagtagctgggtgcagatttcttaatacaaaaacccggttgcctatgtctacatgttaggtaagccaatttagatttagtcattttataccaaagttatttacagaaaaaaagtagacctagttgtattatcaaaaaattagagttgactgggcacagtggttcactcttgtaatcccggcactttgggaggctggggtgggtggaccactttagctcaggagcccaagaccagctcgggcaacatggcaaagccgtatctctacaaaaattacaaaaattagggcgtggtagcatgtgcctgtagtcccagctacttgggaagctgaggtaggaggatcgcttgcacctcgggaggcggaggttgcagtgagccaagattgcaccatggcactccagcctgggtgacagagctagaccttgtctcacaaaagaaaaaaaaaaaaaagccaaggcaatacaacctagtaagagtgataaggcacatactaataaataattagaatacaaggcagaaggtgataagtaccacagagtggagagattgatatggaagatcagggaaaagatattacttccaggataaaaaggagggggaaaggccaggtgtggtgcctcatgccataatcccagcactcctaggaggatgaggcaggaggattgcaggagcccaggagttcaagactagcctgagtaatatagtgagacctcgtttctacaaaaaatgtaaaaagccagatgtagtggcacacttcagtggtctcaggaggctgaggtgagaggatagcttgagcccaggaggcaaaggttgcagtgagccgtgattgcgccactgcactctagcctgggcgacagagcaagatcctgtttccaaaaaaataaaataaaacaaagaaaaaagaatacaatatattgttaactataatcatcatgtagtacaatagatcttttgaacttattcttcctatctaagtgaaattttgtatcctttgaccagcatctctccaactccctcctttcaccagcagtcacctcagctgctagtaactacctttctacattttttcttttttaagacagagacttgctctgttgcccaggcaggagtgcagtgatgtgatctcagctcactgcaacctctgcctcccaagttcaagtgattctcctgccccagcctcctgagtagctgggatcacaggtgcgtgccacctatgatatatatgtgtgtatatatattttttatatatgtttatatatatgtatatataaatatatatattatatatttatatatattttataatatatatttatatatataaatatataatatatatataaaaaatatatataaattagcctggctaaattttgtatttttagtagagatggggtttcaccatgttcgccaggctggtttcgaacttctgacctcagatgatctgaccacctatgcctcccaaagtgctgggattacagacatgagccaccatgcctggccaattctactttctatagtacttctatgagatcaacttttttacattccacatatgagtgagatcatgcagtatgtgtctttctgttgctggcttatttcagttaacactttccaccaggttcatccatgttgtcacaaatgacagaatttccttttttatggctgaataatatttcattgtgtatgtataccacattttctatatccatttgtcagctgatggacacaagttgattctatgtcttgtctattgtgaataatatatagcaaacatgagagtgtggatatctcttccatattgatttcattttttaaagatatattcccagtagtgggattgttggattgtatagtagttctatgtttaatattttgagaaacctccatactgttttccataatggctgtatgaattcatattcctactaacagtgtgtgcgggttcccttttctccaccaaagacttgctatctttggtcttttccataatagctattttaacaggtgtgagatgatgtttcattgtggttttaatttgcatttccctaatgttgatgttgagcatttttttcatatacctgtttgccatttatatgttgcttttgagaaatgtctgtttgagtcctttgcccattttttattggggttgttttcttgctattgaatttattgagttacttgtatattttggatattaatcccttatgagatgtatattttgcaaatatttcctcccattctataggttgtctcttcattctgtttattgtttcctttgctgtgcttattagtttgatgtaatcccatttgtccacttttgcttttgttgactctgcttgtggggtcatatccaaaaaatcattgcccacactagtgttatggagcttttcccatatattttctgtcttagttcattttctgttgccataattgaatgcctgaggctaggtaatttataaagaaaagaaatttattatttacggttctggaagctgggaagtgcaaggtcgagggtcttctgcatctggtgagggccttctcagtgtgtcataacatggtggaggacataacgcggtgagtgaggcacactgagaacaaaactggctcctatgacagatctactcttctgataactaacccactcctgttcttccccattaattcacccactaattcatgaatggattaatccacttatgaaggcaaagccctcatgacccaatcatctcttaacagcttcacctcttaatactgttaaactgaggattcagtttcaaaatgagtttcaaagggaacaagcattcaaaccataaccattttctgctagtagtttcacagtttaggatcttacatttatgtctttaatccattttcagttgatttttgtatatgggatgagatgagggtctaatttcattcgactgcatgtgaatctccagttttcccaacaccgttccctgaagagactgtcttttcgtgtgttcctggcatcttcgtccaaaatcggttggccataaatgtgtggatttatttctgggctttctaggctgttccatcagctatgtgtctgttttatgccagtaccatgctgtttggttactatagctttgttatatatatatattttatatatacgtatattatatatatataatatatacgtaattcttttttttttttttttttcttgagatggagtctcgctctgttgcctaggctggtgtgcagtggcgtgatcttggctcactgcagcctctgcctccctggttcaagcgattctcctgcttcagccacctgagtaagtaactgggattacaggtgtacaccagcacacccagctaattttgtatttttagtacagggtttcaccagttggccaggttggtctcaaactcctgacctcaagtgatcagcctgccttggccttccaaagtgctgggattacaggtgtgagccaccatgcctggcctttgtaataagttttgaagtgaggtagtatgatacctccagctttattctttttactcaaaattgctttggttatttggaaccttttgtggtttcatacaagttttgagattgtttttctatttctgtgaagaatgtcattggtattttgatagggattgcattcaatctgtagatcactttgtgaaatttttttttcaaaaacataatcataataccattgtcacacgtaaaaataattaacacttatttttgactgaaccagtcttaacaagaagcatactagctattagccaggcctcagatgagaggatctaggcatcatcattcacacaacaaaatatttatgtgtaaatgacacacactaacaagcctaagtattaaataatgtactgaaagaggagagtctctctcctgagtaatttactaaggacttcaattgtgaaaagtatgccccaaacaccaattaagtgtgccaaaagcaatttattcatgtttctagagaaaaataaaaggggaatatctgagttgtggttttccatgtatgtggatagtcgcattagtaatgaatcaaggaacactttatttcatttgtgaagcagcacttgattttatatgctctgtggtctcagttggctttacataagccagggataggatttaagaaaagaaatctcttcaagttcatgtataatcaatttatttagaacctataatcattaagttagctgtgtcatatacaaaattagaagaaaattaaccaattatcttttgttacttattttttagaacctgagatttttgttcaactttgtaatgtgaaccttttctgaaagctctatttgtcagtggcagaaatattacaaatatttctagcatcatacagtttttcatatgcccttaagtagtttctaacattttaacatttttattcatatctcttaaaaaagaaaattttgaagagttccttttcatttatttacaatgaaatttggaaacaaaaacttattacattacaaaatctaaaataaagttaccttttttaaaaaaatggatcataaacattttgtaaaaagagttgaaaataatcattgttcttaagtcttactgctagaggaagttgtacacattaaggatgtatgtggcactgtttccaaaataaatgtatatttatgctacataagaccaagattagaccattgaagttgtaatgatcattctagttctcaaattcaaatgcaatttttttcaatacaaaaaagagactgtacaatgaaggaaaactcataatgcttttgactttaccagatgctagaggctactcaaaataaaggccagaatgtctccatatttagcgtagttcttctctatactcaacatacttgtagctgagttcatggtgtacatttttcgtgaatggttgtttataggatgtttatatattatcttggcaagataactttgaaagcccactgttttcctagcatttttctatggttgctaaacaatttctgcccaatctaaaaaattactttcctataccagcaggtggaggcaagagcagtcgaattgtagcactttgcttttcaagtgtactggcatgtattgtagattatctatccatgactcaaagtctctttatgacgtgtctctcacataattacttttcttcaacaactctgttgttgttttagcatcttcttttgattgctttattatttgctttatttacttggtgtctgggactgaacttagtggtcattttaggacagactaatttagattttcatcactttcctatactcattgattgaacagttaaaacatatatgttatatgctgaacacattcttccacatttgccaagaaatacaaaaatgactaagacatggaccacattcccaaagagcttacattctagtagaattacaaggaaaaatgtcttcaattcctctcctgacttggggaagcagatcagtcagccttgctggtatagctatggctagcattgggtagtaataaagctcagtattcacgtggattttaattccatcaacaaatatttactaagcaccagggactacattggggattaatttataaacataggctttttgtcttacagataaaaaaggccaaaacaatcttcaaaagaagtatcatttatttttaaacttcttaatacagattatatagaacaaatagttaaccgacatatagatcctgatgcattgcatttaaggaactttcagttagaagtaactgtgtgtaacattttctagaatatacttagaaaactttccacaaatcctggttgaaataaaataaaagtatgttactctacatcaattccattagctgtttatttgtagccaataatgataaaaaatatatacaaacagtatgaaagaggagaactgagttctaaggttatgtctgtatgtgcagaatgagagatggagaagaaactcatagttatggaaaacagaaaagaatggccccagaatttcttgcaagacttagcagccaccaatattcagaactgtctttaagccccaacctgtccatcatcttaatacattgtgcatcagaaatttccaacccaattaaaccatttttgtttccttcattggtttatttatgaaagtcactaaaaagacacaaatctggtctaacctattttagccttacctcttatccctccacatcccattaaacccgtgtacccaccttacctcatagagctatcttgaaagactcagccagtttagaagttacatcctcattgaagtctttcctagattccccaaggcagagtcacacacactgtcctcttcattctccattgccttatttatatagaatttgttacctgatattctgttatttcattattatttttagagacagggtcttactctgttacccaggctggagtgcagtgacacaattgtggctcactgtagcctgacctcctgggatcaagtgagcgtcccaagtagctgggactatagatgaggtctcaccacgttgcctaggctggtcttgaacttctgggctcaagtgatcctttctctttggcttcccaaattgctgggattacaggcgtgagccaccacacccggcctgctacctgatactctaatgtctctttccgtatttcttcctcacaagtctgtactctcctgaaaggtaataactttgtcttattcatctttgtaacctcagtaaatatttgctgaaggaataactgaatcaactatttcttgagaagtccttttataataagcttctctctccccttttttttttttttttgctgatgtctgaattatagtcataattccagatgatagatgatagtaacaagtcaataaatcctatcaatagggaataaagaaccagcatttattgcatagagtgttttcttaggatacctcagctgaggctgggcacagtggctcatgcctgtaatcccagcactttgggaggccgaggcgggtggatcacctgaggtcaggcgttcaagaccagcctggccaacatggtgaaaccttgtctcgactaaaaatacaaaaatttgtattccagctactcaaggggccaaggtgggagaatcacttgaacctgggaggtggaggttacagtgagccaaaatcatgccattgcactccagtctgggtgagagagcaagacttcgtttcaaaaaaaagagaaaagaaaagaatgcctcagctgaaccttatcaataaaagatgtagattatttgtttgagtactttaaggaagaatttgccatttcctgggagtacactgtttccaagtgatttattgattacctatgaacagttcattaaagggctctggaaaaaaatgagacctgggtgcagagggcagccatccaggtcttccatgtttgagtggttttactctttgagaacaggtgactaaaaagctgcccaagtctatgtgacctgtttttcagagctggatgaaagctaaagtggggcacttctccacagcccctgcagcaatctctcagggagtggtatagataacaagtcagacatgtgatgtaagcatgtatgctttaagtcaccttattctctccccattaaaagcaaagtacaaaatcagagaagtgcaattggtgagaaatttgatgatttccttttctgggatgggagttgcagcatcagtataggataataaagaataagggccctcagatacttttcagtttataaataaaaatacaaaagaatatgggctctggagtcaggcttgggtttgaatcccagctgcacaaatgctatgtgaccttgagcaagctacttctctgtagccagtaaattgggttgataatatcttcctcttggcttattgggaggattaaataagaacatgcatataaactcttggtgtagtgtcttgcaaaggcctgaggagagcttaacagtttgagggagatgtgaaagtagttcattatgtctggagcatagatatgagagcaaaaggatggcactgagaaagccagcatggtagttagggcagattcagaagtagtagcttgaacttgatcctgaagtcactggggaaccatgccattgaaagggagtgtcatgatcagatttatgttttaggatgattactctgcaggcaatctggagaacagattagaaagcatccagaacctcccgggtttctgatttggacaactgagtacatactggtgatcgtccttgagataagaaataaagaaggaggacagttttggttctgggggcaaggaagatgagcaatttaattttagacatactgtattaaggtgaccattgacatccaagtggagctacccaacaggcagttggtcatatgggtctagaactcaggagatttgtgctggaggtacagatctggaagtctttagctataggtgacatgtgtagccatacaaatggaacaggcatggtgtgcaagatgaaaagaaaagaggccatagaactgaatcctgaagagctctaaggaatcctgagaaggggctaaaaacaaaaacaaaacctaaaaaaagacaactgatgataaaaatcatgagggaacagccagagacatcaaatgaaaagaggaatcattatcacaaaagcccaaagagggaaaagttcccaaaaaagagggagttaaaaacaggaaagagtggaaaacactgtcatgtatcacaaaaagtcaagatgtaaatagtgaagaatgtctgttgcatttagtagaaatcactggggaccttggtgagagcagtttccatttttttatgagaccaggacccagattgaagtagggtgaagagtgtttgggacataagaacaaaaagatagtagggctggctggaccactttgaaaagtcttgaggatgaagggaaaggaagaaatagtggtgtctagtgggggacccaggatcaaggaagtttttgtttttttacttaaggtggagaaatgtaaatactccagcacatgtgtgtataaagaggcagtacaaatgagacatttaacattttgctgagccgggcgcggtggctcacgcctgtaatcccagcactttgggaggccgaggcaggcggatcacaaggtcaggagatcgagaccatcctggctaacacagtgaaaccccgtctctactaaaagtacaaaaaattagccgggcgtggtggtgggcacctgtaatcccagctactcgggaggctgaggcaggagaatggcgtgaacccaagaggcggagcttgcagtgagctgagatcgtgccactgcactccagcctgggtgactgagcgagattctgtctcagaaaaaaaaaaaaaaaaagattttgctgagagagatgatgtttcatgggtgatgtctctggaagagattggataggacccaagcacagagcaagaaattggctttaggcaagtcagatttgtcttatactagttaggagtaaagagaaatggatgatacagatgcagctatgttcgtaggagggaagtggagggaatttctgtgtgatggctttagtaatgtaggcagcaaggtcaactactgacagtgagaggagaaattcggggaggctggtcacagtttgaagtaataggtcatgggaggcagatgtttgtgggtggattttcctgaaggcttgggagtccaactcaaatcagaggccatgatataatagtatcaaaacccatagctctgttcagagcctgctatgagaatagagaaggtagctggttaaaatggtcctgagcagaggtttttaagattgatatagcagaaggactggaagttggggttttggtgagagatggttgacctgatagatgaagttcacttctaacagttgtgcaacctgaggtgaaactacaattggaagcccacccctggccccctcctgtaccatgaggggcctcacatgtgtacggatgcccccacctatatgtccaaactctgaccacactccctgctcttaatggccacacctcagtgcaagatatgtacaaaccaatggtgcagttcaccctcaggaaaatggaccctaggaaggggcccacacagattctgggagccatttgagcaagggattctggagtcttgtcacccaaagcacagttgcaggatgttagtggcaagctttgcatgagcacatccccttacctcatctgagctgagtgcagacacaggagggccagagtggagcctgccaaagtacagcagtcagccaggcgcagtggctcacacctgtaatcctagcactttgggaggccaagacgggtggatcacctgaggtcaggagttcaagaccagcctggtcaacatggtgaaaccccgtctctactaaaaatacaaaaattagctgggcgtagtggcacacgcctgtaatcccagctacttgggaggctgaggcaggagaattgcttgaatctgggaggcagaggtttcagtgagccaagatcgtgccactgcactccagcctgggcaacagagcaagagtctgtctcaaaaacaaaaacaaagtacagcagtcatccaggtcgaagggttgagctgtgggagaagtctgttagagtgagaaaatagagggattaaaggactggagttctaagggagatggaaaactaagaatcatgggagtagataaatggaagctgaaaacatagaaggttgtgattacagtggaatagctgactttatcatttctgaggagcatctccaagtggtggtaagaagaataaatacaaaggttcttggagtgaaataggttaaggaagtgatgttggctgggcacagtggctcatgcctgtaatcccagcactttgggaggccaaggtgggagaattgttgagcccaggaatttgagaccagcctgggcaacatagggaaaccccatctctacaggaattaaattagccaggcatgatggtgcatgcctatagtcccagctattagggaaatgggaggatcaagtgcttaagcccaggaagttgaggctgcaatgagttataatcacaccactgtactccagcctgggcaacagaacgagaccctgtcccaaaaagaaaagagagaaaaaagaaactgaagttaagggagtggtaagccttgtccacccatccttagagtctccctgggatgattatggaactttagacagggactgatatggtttggctgtgtccctacccaaatctcatcttgaattatagctcccataatcctcatgtgtcatgggaggaacccaatgggaggtcattgaatctgggggcagatttttcctgtgcttttctcgtgatagtgaataagtctcacgagatctgatggtttcataaagggcagctccctgcacatgctctcttgcctgctgccatgtaagatgtgactttgctcctccttctccttctgctatgattgtgaggcctcccagccatgtggaactgtgagtccgttatacctctttttccttataaattatccagtcttgggtatttcttcatagcagtgtgaaaatagactaatacagggactgtagagctaattctttggtgaatatgagaaaatggcaaagagtttagttgatgacagcaacaaagagagttagtaagggatgtagcaggaagccagtagcctcagaggattagaattgtagtgcagtaatgatttggacagccctttgaggatcaaggagaggtttaccctgtgtcaaggcctcctagtgtgaggagcctgagagaatgtcagtgcacttcatgggagaggcagtgcattcaccaggaatccaggttacagtgaagacaaagtggaaaagccagtgccctgtgacagggttgaggatgtagggtagggggttgagtgtccaagaaagagactggcatgatgggagagcttcaccaactggtgatgctgaacttttggaacagtggcagaatgtatgctgtgaaaggacacagagcagagagaaaacagtaagttcacaaatatttgctgtgttgaaggtctcgtactagaaacctttaggtaaacttttgtgacttctatcttagtaagctcagtcagtgaataagattaattctcacttgtaaaataataaggacatgaaatttaaacagtcttgtggaaaaaccatttttatattctaatcatattatcaatacccttggccctgctccctatggaaagaactgaaagtcttttctgccacactgtgctcttgaaagtagtgcttactccttatttctgcatgttgtgaggattagatgagtgttttaacactcctgcacacatgagctactcggtaaatgagttctcccttcctctgtttctctgtcctttcttccttccagagaagacacctaggaacctagtttgcgagtggaaaggagaaagggtacccaaggaagggcacaggcagggctgcttggcatacatgtgctgtcatgtggaatctcaggaatgggatcatccagtcagtgctgtccgttcgaactttctgcagtggcgaaaacattctctatctgtgctgtctagtgtggtacccacttactacaagtggctattgaatatttgaaatgtgcctggtacaactgagaaactgaattttttattttatttactcataattcatttaaataaccacatgtacctgctgtgttggactgcacaggtctagtggataatgtgctgcttggctgaaggcttcaagaaagaaatggactgagtacctgaggaaatagataagttggcctggcacgatggcccatgcctgtaatctcagcactttgggaggccaaagcgggtggattgcttgagcccaggaattgctcattatgggcaacatagcaagactccatctctactaaaaatttttaaattagctgggtgtgctggcacatgcctgtaatcccagctacttgggaggctgaagcaggaggattgcttgagtccaggaggtctagtttacagtgagctatgactgtaccactgcactccagcctgggcaacagagtgagactttgtctttttaaaaagtaaagagaaagagagagagagaaaaataaagaaaaaaagagaaataaggaaagaagaaagaaaagaaggaaggagaaagaaaaagagaaacaggtaaacctcagtgaggtgtgtagctgggatttggcattgtagaaatcagaaataaaggagtcctatatggtctgatgaaaggaccctggacttgagctatggcctgagaagttgtgaggagaggggtgatttagtcaaaacaatggctagaaagacaactttgtaaatggtagaaatcaggattagagtgtttctgatgtaatagccacacaagagaaataattaaacttatacaggaattccggtcttgtggggagattgatttaatgcagacctcaagagcagcttgtagagaaacattaattgcaaagcaaatactaggaatatttgccaagtgtttcaaagaattgggacaaatttctggaaatatcctgcaaaccatgtagtacaacacagtgacatggtgacagggaaagggatggaaaaaatgtaaattggtaggaggtagaagttgtaaaattttacataatatagtttcactatagccctggctctaataaaacgtgtttccctgtatgaatgtttacttgtgatgatgagggaagatggtgttgctttaatgtttttgtcatatttgtcccatcttgtttcaagtatataatgaacatctgtctgctcatcagtgtgcagtgcattggggtgggggtttgtgatgaaagaaatgtacagtggccattgtgcttgagaagtcctagtttcatttagaatataaaacaaactaattgaataggtgatgacagtaatttaaatgtctaaaatgaatggcacagatgaaaggtgaactggaatggtgaaagccttgatgagaggaagtagaggactttaaactatgcttcaaaagaaaatgaaccccataaatcaacatttctgaaagtacattccataaaatattttacaaaagtctcaaggcaataattaactcagaataactatggcatacttatttgtccaaatgaaattctgtaacctgatgatttctgtcaaaatttatccagctttcttcctttgcctaaacactattattatgatgatgatgatattattttggacacaggagattacaatgctagcaaatgcaccttcctgtcaattcccgtatggtattctgtattatttcttggttagaaatttcacagtgttggcctggtgcagtggcgtatgcttgtcatcccaacactttgggaagctgaagtggaaggatcacttgagcttaggagttcaagaccatcctgggcaacatgggaaaaccacatctctacaaaaagtacaaaaaattagccaggtgtcatgcacacctatagtcccagctacttggaaggttcaggtaagaggatcacctgagctggaaggttgaggctacagtgagccatgatcacgccacctggactgtagcctggctgagagagtgagaccctgtttcaaaaaaaaaaaaattcacaaaggtcatgttttgaaaagtgctttgaaaacagaggagacgatgaagaaggtatgattgagacagaaataataaagagcctggaattttgtagtaggaaaaagaaatctagtgtttaattagacaactggaatctcagatttgatctactttttcattttcaaattattagacgtaataactgctgtaggaaaagacaggctcatgccgtttgtctgcttttgacttatgtagctctcacttgcaaaaagtcagagaaaaatcttcaccaggttctcaagaatacaagtgcagctgctggaatgactacaggtgcactggttttcccacccaggtgcagttctttccagggctgcagaggcacggaaggggaagacgagatcaatgtaccagcatccaaagcattgggtgagcttgaaaatgtaacaaaggggaagaggagggatgctccgcaaaatgaagatgggagaggaaaagcagagataatgcagaaagaaagtactcagtagatcaaaatgttttagttagaagtataaggcattccgctgtcaccattccttttctttggtaacaagaactgtgaatcctgaaaagaattaaggtaaaatctcagaaggtgagaaaaaaagtattaagataaaaattttaatgtatttagttgacccatgacatcatgatttctagcttttgtttctgtctttttagcccttccaggttcagggaatagtattacattaagggagaaatagcttttcactagttgccttggaaactataaaacatatatgtgtccggccgaggtggaggtattgacatccttatcagtttaactttcccactacaaataaatgacaagtgtctgaggtgatagttatgctaattaacctggtttgataattacacaatgtatacatgtattgaaacatcgcactgtatcctataaagatgtgcaattattgtgtcaattaaaaacaaaataagacttaacaaacaatcagatatgctgtgaccactcagccttccagtaaatgttaggaaatagatgaaaaccaacgaaggtcatcttatcagtgaaatgcttgaagtaattttcttttaaagctgaataataggctgggcacggtggctcatgcctgtaatctcaacacattggaaggccaaggtgggcggatcacttccggttagtagtttgagaccagcctggccaacatggtgaaaccccatctctaataaaaatacagaaaactagtcaggcatggtggcacaagcttgtaatcccagctcctcggaaggctgaggcacgagaatcgctttaacctgggaggcggaggttgcagtgagctgagattgtgccactatactccaacctaggggatagagtgagactctatctccaaaaaaaaaaaaaaacctgaatattaatgatactaatggaaatttgtctatagtcattggtttatactaagaggagtggtgaaaagaacagggtgttaagatggatatgtcctatgttttagtcgttgttcttctctttcatattcatgtaactcagtcatctcagggccagcctttttacctatactgggacttccttgaagtacagcccgtcatggccatgactgactctttcttagtggcctctgttggcagaaataattattttggaaattttcagccaactgtataaatcctgaactgaacatctttattattttgcaccaacaccaagtatgtgagaccctctactcatctgccatttcttgtactctgacctccatactgttggtttctccctatacttattcctttatcagttttcattcctttatcagtaggatcctatatgaggcaaataatataaaaccccattctaactgatttcatcatagaggggacttactgactcataactggaatggtcaggctttacaattagttgatctatgggctctatggtgtctttaaatatttggtttccttcctttattctgccattcaaagtgtctgttttatcgtaaatcagattctgctcattctcataggatggctgccagctgcaatcaaggacataagtgtactcacacttagtgggaatgagacccccttctctcacagcattccaagcaagagtactgagggtagggacagctaccttcaaagaacgtgaactatgttgggggtgtatgagtgttgagaggaagatgtgcatataattagataggggaagaggttaatggctagacaaccatgtatatctaaccatctactgcactgacttctccattgttatttctggaacccttgtcctatggtaaataaactcctccactttttcatactattccctgaatcttcccttctcttcctgaccttttctaaaatccactgaaccctgacaaaaatgtttcccatgcatccctcttcctcccacaccccataccacaaagtaaggaggaaagatcagtatcttcttttcccccagaggccccctccaaccactgtgatgtcctgcacttcttcaccattgtgtaaaaacacctttgaggctcatcatctggttttcccattttatatcctgctcatgttgtctctcccagtcagctgagagttccttcttcagatactcgggttcctggttcagtcttcctttctactcccgggatccaccatcaacctgctgactccagtgttcatgtaggcaatttatccaaactagactcttgtttcttcacactcttgcaaagaaactgcttaacccttgaagtcttaaattcagatatctcacatttttactataacctgactactcccattttactgttttattgattttactaagactgtagtttttctgtctaaaacattgctcatgttttatattccatttcttcctatctctgtagggagctcagtctctctaaatatcttaataatgtaattgaaaaaaagtggtttcaagtagaatcataactatgataaatttcttacatattttgtggaaatttaaaacatatttatacccaaaacttttgatctaaaaccaaggccttttgctaactgtaaatgatttgattggcatttctcactatccttcttgtataaactacacctataatgcatcatctttgatttccagtttcagcttctcgaaagtggaacatgcgtataaggaaacatataagtagtatgaattcagaagccttctgaattgtcacaattcctttcccaatctttcataaggacaagttttttgtgggagttgatttttctgtaactctctttttaaaagtatttctgaaaccttttacctatcccagaaataagtttttaaatgttgtatacatttaatcagtcaaatatttaaattacatgaaaataagcataacaggcataaacaggttttggaacaacaggcttaaccattagttagcatataactcaactggtggaagaagaaatgtgaaaatgtattagaaaatagcctggcagcctggagttgtaagcatcaactagtatgtggacatgagttcttgtggagagtaagttgaagaggtcagtatttaggtctctcctgtgtgaaaaatgtatctattctgtgcctcagcctcttttagctacactgcgttagctctccttatttccacggccagatccacagagaattgcctaggttcacactctctccagttcttcacctcttccttattcctccatcatagtagtctgacctgtacccctgctgctcccctgacactggttttgccagagtcatgaatggcattctgctgctgtattcaacaaagacttttcagtatttctcaacatctgtacgtttgctgttgttttcactgcttgcttgtcacaaggtcctagaacccatattggcctaatattccttctccctcagtgatcatattagagttagggccccaatgcttttctcttctcactctgcaaactcccttgagtactcctataagtaaaattaccacttaatattaattcctcttacatgttctgtagccacttcaaacttggcatgtccaaaatcaagtttctcttttttcccccaaaaagcctcctttcccttgactctcttgactctctcacctccaccgcctccatccattcagtaccaaatccttttgagtcaaactcctgaatatattttaaatcattccgattcctcctatttcctagttttatatactttaatcatgagccccaatagctctaagaacaacttctctcttgaatgatctcttttacaaacctttcaactcattataatttgagtgatttctctaaaacacaaatctgttatctgtcacctgattaaaacctttctatggctctcgaattgccttcagaataagattggatgtttgggggagttttttgttgttgtcgttgttgttttaatgtttcgtagagacaatgtttcactattttgcccaggctggtctcgaaccctggaccttaagcaatctgcctgcctcaccctctcaaaatgttgggattataggcatgagccacggtgcctggccaaggttggatgttctgatgattcccaaggctcttcatttgctaaatgaccttacttaccttttcagccttctctccccttatggcattacctttggataattcctacacattgttcaaatgttggtttgctagttgctctttctagaaaatctttcttgacacattccccctgccccaagaccagaatggggttcccttcgtttggagttctctttgcttacacttgtcataacactcatctcagtgtagtataattgcatatttatccatttgtcctttctactgtattagaatgtcagggtctaagacaatttgccatttatccacattgcctgtcacgtaactagatacagtacatgctcataaatattagctgggtgaatgactttaaacaagtcacttagtctttctgaggcttcaattgctttattagaagagaatacagtaatgccctacctaccttataaggttgttttgggatcctgtaagataatagaaatgaagcttagcatagtggttaagagtatgggttctggatccatactgcctagcttttaatcctacctgtgaccctacaactagctgcgtggctttaggcaagttacttaacttctctgtgttttagttttctcttcagtaaaatgagactaaccacagtatataacttagagggttgttggaggactgagtgagttactacatgggaagtattttgaaccatgcctgaacagacaataaatgttagctactaaatataacatttttatttgtaagccctaaaattatatgtacttatatatatgtatatgtatgcatatgtatatagacagagagagaaacatggcatcagtattactagtttgaatgttttaagggagtaaagactggtatcattattctaaacaatttcttttttctttttttcttttaggataatggcatagctatcccagagtttattttccaagtcttaaattcaaattgtcattcttaatttacatgaaattttggttaaaaaaaattggtgttcagtataagaagagaagtttttaaatgtttcctcgctaaacttgcaaggttttttcgagtctatgtacatagtaggtgaaagttagcattggaaaaatattaaaataaaaaagatactggccgggtgcagtggctcacacctgtaatcccagtactttgtgaggccaaggcaggaggattgcttgagctcaggagttcaagaccagcctgggcaatatggggagacctcatctctacaaataatttttaaaaattagctcggcatggtggtatgtcccctgtagtttcagctacttgggaggttggggtgggagaaacacttgagtccatgaggtcaaggctgcaatgagctatgatcacatcactgcactccagcgtgggcaacagaatgagaccctgtcttaaaaaaagagggagggaagattactgatttaatttataaaggagaattattatagctccaacacctgactttatttatctatatgatttaattacacaaacaattcagtgtttgaattatacaaatttcattaaaactatgtaattatgcaagaaaaataggaaatacaggggcacttagttttgtgcatatgtgttcacctgagagtatttgcttgtttttttaaaaaggttctttttaatttaatatttaattttataatgcacattcatatgttgactttggaccaacagaaatccctaattcttattctttttctgattctttttagagttggtggttccaggattttactcagaatgacgttaggaagagaagtgatgtctcctcttcaggcaatgtcttcctatactgtggctggcagaaatgttttaagatgggatctttcaccagagcaaattaaaacaagaactgaggagctcattgtgcagaccaaacaggtgtacgatgctgttggaatgctcggtattgaggaagtaacttacgagaactgtctgcaggcactggcagatgtagaagtaaagtatataggtgggtcagatgcagaagcatatcagtgtttcactttgtggacatcttaaatcatttcatgctttctgtctttcagttttccagttttacaagcattgatttttacattataattaattgcttagaattatctaagattttaaaattgtttatgttgacaaaggtgctataaaatgtacactctgattacactgctctctggagagcattttgacaatgtgtcagaacttttaagacattcatacccttgctcattaattccacacctagacatttattctaagaaaataatcatatatatggaaaattcatgtatcaatttatgtataaataggtattcttgttatatcataggcttagaaacaattcccaaatgtcaactaatagattagataaataaattatgaaacatccatcctctgtaatgctgtataaccattaaaatcatggattacaagcagtatttaatgacatggggaaaaggacacagaagaactggaagaaaataaattttatcaatggttttgttaggattctctagagaaattgaacctatagggtgtgtgtgtgtgtctgtgtgtgtgtgtgtgtaagtatatatatatatataaacatatgtatgtgtggggagagagagattgattgatagattgattatagggaattggcttacatgactaaggagtctggaaagtccagaatctcagtgggggctggtaggcttgagacccaagagagctgatgttccagctccagtccgaaggccagtagcctagaggcccagaagaaccagtagtgcagaagtctggagactgcaggaggattctcccttgttcagggagtcttttaggccctaaactgtttggattttggctaccacattatagagggcagtctgctttacttcaggctcatcactctaacgttaatatcatcaaaaacaccctccaagttaacacataagattaatcatcagaatgtttaatatatcaggtgatgggtttatagctaatttttactttcctctttatgtatttctctattttctgtattttctgcccttacatacattatttttataacatattagacccttcaagttataaggagtgaagattccctttggttacctctaagggttggacatactttgtagaataattatgacagacaactttggctgtgtatccaggcttcatacaagaatataagatagctgcagaactggatattgtaaacattcgtgggcattttggaatttgaaagatcatcagaatccagcatagccctagtgacctggtcatctccttgcccccactatcccttcatcaccaagagttctctactctatgtttcactgtaaaaaggacttggctattttctcttatctcagtgtttgttggctattttctcttatctcagcatttgtttcagtttctgctcctactaccaactgcttcactttcattaatggcttctcaatcttattacacgtcttgaatttaaactcgtgaataaaaagatctggttgtcttcattagtcaaagtcaaagggatagagttagtccctattcagtagagcttttctagctggcaacttcatgtgcgtgtaccatcctggatgtggtttgtccttggttcaggtgctcacttcttcagtcacttgtggccaagatggtataccaacccataacttaggcatttgagacaaagtctcactctgtcacccaggctggagtgctatggcacaatcctagctcactgcagcctcgaactcttgggttcaagagatccttctgcctcagcttcctgagtagctgggactgcaggcatgtgccaccatgcccagctaatttttacattttgtgtggagatgggatctcactatgttgcccaggctggtctcatgtatgttgcccactccttgtctcaagtgaaccttctgtcttggcctcccaaagcactgggcttacagatgtgagccaccatggctggctcaaacaaaatctttataaaataattactttaaattgtttttctctcaatagtagatcttttcagcatactttcaagtttgtgatgtttgttcttgctcctctataaatttatttttgtgggttaattatcaaaatttttgagtttaggaatagatttcttaaaaactaactttctcttatctgggcatattctctgagtccattatgcctctcacagtagctgttgaaaccttgtttgtctagtgtcaggcactgggcgtcagcattgtctatggtttggcagtgagagcataaatctggttccaggtctttgtggcaaagtaaggaaggaaatggctttcagcacctttgtttgtttaagaatgtttctaattttaggctcctgcatttgatgttgcttatataagtttatgagcaatttttattccttcttaatatatttcatagctaatttattttatttttttattattattattattttttgagatggagtttcactcttgttgcccaggttggagtgcagtcatgtaatcttggctcactgcaacctccgcctcccgggttcaatcaattctcctgcctcagcctcctgagtggctgggattacaggcatgcaccaccgtgctcagctaattttgtacttttagtagagacaggatttcaccatgttggccaggctggtctcaaactcctgacctcagatgatccacctgcctcagcctcccagaatgctgggattatgagcttgagccaccgttttatagctaatttttaaaagtaaacatattgcaaccatatagttaactagtatcacttaaataagtgctgtattaaatttcaaaattttctattccattctttccttaaccgacagacataaaattattattaaatcctaaaagcataatttcataatttgatatttcaaaaatataccttatggatttattctgatatttgtggcaggtatttctaatagctttatttgtaacaatgttttaggaggactgatacgagtgtttaactgtataatttcttgctgtataaaggatagctctactgtctactatatatcatatggaaattttactgtttataataccttcacaatactgaagttaatcaaataaaaatttacttattttcacagcataacacaaccatcactataaaccatacttatttttgttctatagtattggttatttcactgacatcagagatttttacccaattaaagttaaaatacaaattgatgaaaaacccaggaaccacctttaatatgtgaagattaaaccaaactaaattatcattattatttaatggactgtctccaatgtctggctacttgttggatgtgtccacttagatttctggggatcctttgaagttatctggaattttgaatgtttttatgtatgtgtgcatttggggtagggtccgttgctttgattagattttctatggagtctttatctttttatgtacccttttcccatcccagatcctaagaagcctcagtataggaactgtgtctttctcttcctgcattgccagttgataaattacaccctcaggctagatgcagtgattcatgcctgtaatcctaatactttaggaggctgaggtgggaggatgactttagcccaggagtttgagaccagcctgggaaatatggcaaaactgcagctctacaaaaaaatataaaaattagctgagtgtggtggtgcatgcctgtggtcccagatactcagtggtgttggggaagaggggtgctgaggcaggaggattgcttgagcctgggaggttgaggctgtagtgagctgtgattgcaccactgcactccagcctgggcgacaaagcaagaccctgtctcaaaaaaaaaaaaaattgtaccccagtatactttgataagtgctcagctcacatctttaccgttcataatgatgccagctggaacagccaaatcctatattagatgctttttcttggtagccttaggaggctttacagaaagtataaaataaaacaaacttttattggcatgatcattcatctgggtatgaggtatttggcttaatactgatttgacaagtcctgttgtgtggtgatagtttttttctccatctgcagtggaaaggaccatgctagactttccccagcatgtatcctctgacaaagaagtacgagcagcaagtacagaagcagacaaaagactttctcgttttgatattgagatgagcatgagaggagatatatttgagagaattgttcatttacaggtaagtggtgttataaatccctttaaagagggaaaaactctacaacaaaaaagaacattcagtcataaataaaacatactgactggattttcttagcttttgtttcgaatgattataaaaccataatgggcattatatagtattacataatgttaattatatcgttgaggttatgttgagctgctaattccattcacttaaagaccaaatgtagaagagtgaacatctgtaaagttaaggctttttaataacattatgaacttgatggttacatgtaagggttatcttagaccaaatcaattagaagcaaatggaatcaagttgtttatctgtaaatatctcgtggttttggaaccataatattgatgacatactgttgatgctgtatgccggagtcattcctgtctgtcatccttacatttttcaagacttggggaaattatggataataaatgttctaggtgggtctgtccaggtgtttttgatctttttaccaatgttgatttgcctcctagcagctttcaatttttattttcatgacacttcagcaatttttttggggaaaaaaaacagtttcaaaattccaggctttttttttgtttaattttgcatgtttctttctgcagaatcctaattactttttcctttttagcagaccgtgacaagagttggaatatttaatattttaaattaaatagcattttaatttgtaactcattatacaatgtgtcatcaagatttagacatgtaaaatgtatatcctattttctcatatcagacaagcatttttcatcctataattgataatcatataattcataataattcacatttggtctataaacttcatggtgaaagtaagttatgaaaataactttatgattattcttcattagctaaattgttcttcttgctccttttgaccacagttatttgatgtgatttgaatcatggtctttatagtctcctcattttatttcatccccaaattacatttctttgttgttctattttttttatgtaatttggaatttttcctagaatttccagtttcctttgattaatcctattttcatcatgatttctaagttcttatttggaataatgtttttgtttttatttcacattctgtgattcttatgaatgttatcaagatatgaaaggtttgtcactttacatttctttgtcatagagtacttttaaattttgtgtatttgagaccagcctggccaacatggtgaaactccatttctactaaaaatacaaaaattagccaggcatggtggcaagcacctgtattcccagctactcaggaggctgaggcaggagaatcacttgaacccaggaggcagaggttgcagtgagctgagatcatgccactgcactccagcctgggcaacagagtgaggctccttctcaaaaattaaaataaaataaattttctatagttttgggattgatcccactaaacttgggaacaaattgctgactctagagtagactggcacactatagtgacctgatagacaccaatgcgttcatcagatttgtgtctttatttgagctggttcatttcgggcctttattttaacaatttaaggtaatttcagatttggttctgtaattctggtttctataatttttattgtgtgaacattttttaggggcttctacaacatttgctaactctacatcaggataataaaaaataactattgtgtttgtttttgcattgaaggtcattaggtgaatttacctacctttaaacatcttccatgacaaatggttatgtttatttaggcaatttttttaaaaacctagaattaccagtattagttctctgctggagttggacactttaataaatggtaaaacttatcccattcgtacctaaagggcaaaatcagatatccaaatattttatttattttctctgtgatactgtaagttaaataggatagccatgatatagcatataaagccttcattaatggctgggcatggtggctcacgcctgtaatcccagcactttgtgaggctgaggcaggcagatcacttgagctcgggagttcaagaccagcttgggcaatatggcaaaaacccatctctacaaaaataaaaaatagtggccaggtgcggtggctcacgcctgtaatcccagcactttgggaggccaaggcgggtggatcacgggaggtcagaagttcaagaccagcctggtcaacatggtgaaaccctgtctctactaaatatacaaaaattagccaggtgtggtggcaggcgcctgtaatcccagctactcaggaggctgaggcatgagaattgcttgaacccgggaggtggaggttgcagtgagtctagactgtgccattgggctccagcctgggcaacaagagcaaaacttcatctcaaaaaaataaaaaataaattaattaattaaaaatagaaaaattagctgagcatggtggtaagtgcctgtagtcccagctactcgggaggctgaggtgggaggattgcttgtgcccaggaggttgagactgcactgagcagtggttgtgccactgtactccagcctgagtcacagagtgagaccatgtctcagaaagaaaaaaaaaaaaatccacacataaaggcctcattaagctggataaataggatcttaaatttatatgatgtcagcaatttcaggcctgctctactaaaattaggatgctctgaataatattcccaagacaccaataatatatgtaataatcaaatatattatcccaattggatataaaatgttattttagctctttttattttccacttaaaattaatacatagaaaagtgaaattacttttcataattcttcatgcaatatgggctccagttatctattgatgcataacatattaccccaaaccttagtggcctgaaatagcaaccgtcattttcttttctctcacagtttctatggatcaagaattcagaaaggaattagttggacagttctgacttggggtctgacatgtggtttcaggcagtggtggcttgggttgaagcaggtaggaactaatcaggcatctgtctttattcatgtagtctcaaggtgtctgtatttgtccattttcacactgctataaagagtacctgagactgggtaatttataaagaaagaggtttaattgactcacagttccacatggctgggaggccttaggaacttacagtcatggcataaggtaaaggggaagcaaggcatgtcttacatgatgtcaggagagagagcacaggggaagcaccagacacttatcaaacaatcagatcttgtaagaactcactcaccatcacgagaacagcatgggggaaaccaccccatgatccattcacttcccaccagctccctcccttgacatgcggaaattacaatttggattacaatttgacatgagatttgggtagggacacagccaaactttcatcacacccccagcccctcacaaatctcatgtccttttcacatttcaaaaccaatcatgcctccccaacagtcccccatagtcttaattcattccagcattaactcaaaagtccaagtccaaagtttcctctgagacaaggcaagtctcttctgcctatgagtctgtaaaatcaaagacaagttagttacttctaagacacagtgtgggtacaggcgttgggtaaatgttcacattccaaatgggagaaattggccaaaacaaaggggccacaggccctatgcaagtccaaaacctggccaggcagtcattaaatcttaaaactccaaaatctcctttgactccatgtctcacatccagggcgcactgatccaaggggtgggcccccatggccttgggtggctctgcctctgtggttctcaggttacaacccctgtagctgctttcacaggctgatgttgcctgcagctttttcaggtgcagggtgcaagctgtcatgtggatctaccattctggagtctggagggcagtagcccccttctcacaactccactaggcagtgccctagtggggactctgtttgggggctcctgtgccacatttcccttccccactgccctaacagaggttctctgtgaggtctctgcccccgcagcagacttctgcctggatatccaggcatttccatacatcctctgaaatctaggaggttcacaaagctcagtttttgtcttctgcacacctacaggcccaataccatgtggaaaccaccaaggcttggggcttgcgtcctgtgaagcaatggcctgagctgtaccttggccccttttagcccagctggagctggagcaactgggatgcagggcactatgtcctgaggctgcagagagcaggggaaggaggggggagcacaaaaccattttttttctcctaggcctccaggcctgtgatgggaggggctgttgtgaagacctctgacatgccctggggacattttccccattgtcttgggcactaacatttggctcttgttacttatgcaaatttctacagctggcttgaacttctccccagaaaatgggtttttcttttctaccccatggtcaggctgcaaatttttcaaatgtttatgctctgtctttcctttaaacataagtcccgatttcaaaccatctctttgtgtacacacatggctgtatgctgttaggagcacccaggccacctcttgaatactttgcttagaaatttcttctgccagataccctaaatcatctctctcaagttcaaagttccacagatctctagggcaggtgcaaagtgcccagtatctttggtaaagcatagcatgggtgacctttactccagtttccaataagttcctcatcttcatctgagaccacctcagcctggacttcattgtccatatcattatcagcatttttggtcacaaccattcagtaaatctaggaagttccaaactttcccacatctttctctcttcttctgagccctccaaactgttccaacctctgcccttgacccagtttcaaagtcgcttctacattttcagtttgtctttatagcagtaccctactatcctagtaccaattctctgtatcagtccattctcacactgctataaagaatacctgagactaggtaatttataaagaaagaggtttaattgactcacaattcctctgggtgggaggccttaggaacttacaatcatggcagaaggaagcaaggtacatcttacatggtggcaggagagagagtgaacttaggggaagcattagacacttataaaacaaccagatcttgtgagaactcactcaccatcatgagaacagcatgggggaaactgaccacatgatccaatcacctcctaccatgtccctccctcaatacgtggggattaaaattcagattacaattcaagatgagatttggttgggccacagccaaataatatcagtgtcttagttagactgggctgccataacaaaataccatagactgaatcctttaaatgacagaaattaactttttcacagttgtagaggctgcaagtccgagatcagtgtgccagcatggttgggttctggtgagagccctcttcctggcttgcaaatggccccttcccttccctgctggcctttcctcagtgtgtgcacatggcacgggttgggaggtggggtacaggaaggcgaggggagagagacagggagaactctccttctcttcctaaaaggccacaatcctgtcagattaagaactgcccttctgacctcatttaaccttaattacctgccaaaagcctatttacaaatacagccacattggggatagggcttctacaaaagaacttgaaagggcacagttcagtccatagcgcagagcgtctccatgtggttcatttgtgtgggttaatttgggcttccttacagtgtggtggtatcaggatggtaggacttctttcatgagactcagtgctccaacatgagtgttccggcaaggcacatagaagctactttgcacttatgtgctgtcacggaagtcacatgacatcacttctgccataccatatgggttgacaagtcaccgcattctgcccagattcaaggaacaccacatctcagtctggggagtatcatttaattggcagtcatgtttcaaaaccttcaaaataggggaggaggtggggatggttaatgggaaccaaaaggaaaaacaatagaatgaataagacctgctacttgatagcacaacagggtgactgtagtcaataatgacttaattgtacatttggaaataacaaagtataactggattgtttgtaacacaaaagataagtgcttgagggaagggataccccattctctgtaatgtgattattacatattgcttgcctgtctcaaaacatttcatgtgccccataaatgtatacacctaccatatacccacaaaaaatttttttaaaaccttcaaaacaaataatttgttgattaaatggatggaagaaattacagtagaggataagactaaccggtgtgttgtggtcctctccctcccagtgtatgactactaagactgccttacatttgtgtagcaatatgactcatataaccttgattccaatcttatgagataggcttttttataatataagtggagaaactgaagctcagaaacaataactttccaagagccacatcactggtgggtaagtgcttgccagaaaccatgtagactgtttgttaaacccttcaagggagggaggtatcatgtttgattctattttgcacctctggcagagtgcctgataaaaagcaagcattcagtaaatgttcatcaaactaaagtgagaaaccagttagtggcagatccagaaaataggccttcggtaattgctgggacataagttacccatttggaaaaataaaataaaattgaatgtcttcctgacaaccaactgaaaagcaattcctgatggattaaagtcataaaagactagagcttaaagcttctagatgtctgtacaggaagatatctttatgatatctgggcagggatatatttattaagacgcagaaactgctaactatgaaatataaggctaataaacttgactatgttaatataacttctattcataaggaaaagtgaaaagagttcaaatactgagaaaataactttacaaaacatgaaaccagtgatgcattctaggatatataaagaactactacaatcaataacaaagaaacatcccagtagaaaaatgggcaaatgatatgtagaaatatttcaacagaaacgcacatagcaatcaaatgtatgaaaagatgttcaattttattagtaatcagagaaatgcaaatgaagaccataataagttaccattcttcactcacaagattggcaaagattaagaaaaccaacaatgccaagttatctttgtggatatggatcaacaagaatgtttgtgcactgcttctaagagtataactgattcatcaccaagttggagaaaaacttagtattagaaagttggagcttacattctccacaacctagcacatcctcccactcccacctcagtatttacctagagatacctttgcatttgtgcaaggtaatattgaacaagtgttcatagcaactcagattcccatcagcaagaaaatggatctataaattgtggcacatttatgcaatggaatattttatagcattaaaataaataagtataacaacatggaacaatatagttgaatcttagtaaaagtgaaggaaagaaactgcagaatactgcatacaatatgatactttataaagctcgaaaagaagcaaaactatacaatatataagtggtaaaactggaaaaaatgtttgtcacaaaattcaagagagtagttattttttgcacaggttacctgttgcataagtaaatgcaacggtattattaatgtcctattttataagttgaagggtggatttaatttgtcctcactacatatatatagttatatccatttgcagatatcaggttacacataaaaatttaacatatattaaatgtatccttaattccactaagaaaaaaaaagagaaaaagcagtgaaaacaaggacttcctcatccttttaagctaaaaaaatggccaagtgtcagaagccagcaattatggctgcaggtattagtatttcccaattctgacaagggcttctcaattgttggcttttaaaaagccaacaaacatccaagaagatttcatacctgctctttccagccattttggcgagaaaaatgtacagtgtcttcatgtcaaaacaatcaggcatattctattccagtggcctgctaaggaataaatgcacaagaggaattctttcatgaaatagaggctgaattatgcaagctaaatttgagaagtacagtgatctattgtaatattgtttatttattttttttagagcggcaggctttgatcttgccaattcatcttagccaattagtgatttaaataggaaagctttaatgttacagtgcagatgaataggtcatgagattaagtatatgattttaaacattatgtaatctctcctacttgaccagccatggagacccagctccaaattaaaatacaagaaccagaaccgaccgggtatagtggctcatgcctgaaatcccagcactttgggaggccaaggtgagcggatggcctaagcccagaagttccaaaccagcctgggcaacatggcaaaaccccgtctctaccaaaaatacagaaattagccagtctcataacccagtctcaaaataaataaatgaagagataaaaattttaaaattaagtttaaaaagaaccactaccttaaaacaatgacaaaaaaaaaaaaaagatatcccaaattcatttacaatttcattccttttattttccatgtcttcttgatttttgaaatatgtaagtgtagtcattggtcataatcaatactactaaacttacaatttttttggggtcttaaaagcctagggatccagatataaagcatcaattaccttggcttagtttccccattggctaggcatccttcttttgtgcccctcttttttccaagtacttacctattttttaacatgatgtgtgatattgatgttatctattaatatgtctttcttttccttcatgtgacttaaagctcttcaagaatattcctttttgtttccttagtgccaggaataattaggagctcagtaaatgtaaatgtgtgttgaactgaactagccccaatgaaaatgtatcttcatgcagtgtgatgcctcacttcagcaaccttacgctgtggctcacacagaagcagtgaatcttgcgatggcatattgaattagtagtcagcaagcagtgctggctgtatccccctagcccaggagtgcagacaactacctaagaatgtcctcttcaccatgtagtaagatagcaactttatagtaaatgtcatggactggggcaggggcaagagggagcagaagaactaaattacaaatataatacaattagttatttctctattttagtttaatttttttggtttgggtttttgtttttttggttttggggtttttgttttgttttttgtttgtttgtttgtttttcatttttttttttttagaaacagggtctggctctgtcacccaggctggaccgtagtgacgtgatctcagctgacttcaacctctgcctcccaggctcaagtgattctcccacctcagcctcccaagtagctgggactacaggcacacgccaccagacccggctatactctgttatcctattataattccttagcaaattcaaagttcctaattcttttttgttttttttttttttaaatgagcagggtctcacgctgtcaccttggccagaatacagtggcacagtcacagctcactgcagcctgaaccacctgggctcaagtgatcctcccgccttgtcctcccaaactgctgggattacaggcataagccaccacacccagccctgaattctattttttttttttttttttttctgcaacaggtcctcactctgttgcccaggctggagtgcagtagctcaatcttggctcactgcaacctctgcctcctgggcccaagcaatcctcccacctcagcctcccaggtagctaagactacaagcttgcaccaccatctccagctaatttttgtgttttttagttgttgtagagatgaggtttcaccatgtttcccaggctggtgaactgagctcaattgatccacccacctcagcttcccacagtgttgggattataggcgtgagccactgtgcccagccctgaattcattttttaaatgatattcagagaaatatactatcttaatctccatagttcttttaacggcattgtaatttctcctttgtataatacagaaaatcccactggaataattttttatttatagattttagaaacagaaaatataaagttcttgtgaagaaaaagacaaagtcatgagacggaaggtggggagggtttgggggaaattaagaaactcaatatttggccaggcacagtggctcatgtctgtaatcccagcaggttgggaagccgaggcaggtggatcacttgagctcaggagttttagaacagcctgggcaacatgattaaaccccttctctacaaaatatacaaaaattagccagatgtggtggcatgtgcctgtaatcccagctacttgggaggctgaggtgcgaagatctattgagcctaggagttcaaggctgcaatgagccatgatcacaccactgtactccagcccaggtgacagagtgagaccctgtctcaaaaataataataataatcaactcaatttttgtgataaaattttaaagaatgattaaggatggtaatacagtagtatggtacattgggaaaaacattaaaatagaattcaaagttttttttttttttttgctgtttttaaccattagatagctatatgatcttgggaaaatcatttaacctcagttttcttgtctgtaatatgagtatataatcatacttgtgagagatgcagacagggagagagaatacacattcatattaaaactctttgttacaggaggaagttagcggaaaattaaatcttgtcaccacagagactaaaataaggttccatactgtcagatcatataaatttaaaaatcacttctaagaactttagccttctactctataagcagaaaaacttcacctaaagaggcccatggcctggctgagattcaaggggagaaatttttgttaggaaggaaggtgcaattacagcaagacagtctagaagtgttggctgattccctcttagaaaatccttgggcagtaattctgaccttgcctggagattgtaagagaatattactatgatcagctctgggataggaatgtgcttaagtagcacattttagaagtgccttactcctaccaaagaactctggggatttcccaagacctgtgtctgcctagcaaggagtgtctggttataatagtcagatttctgttgtgtcatttttgtggtaagttaaagatttcattacagttaattagtcatacatatataaattatatatatatatatttttttttttttttgagacagttttactccgtcacctgggccagaatgcagtggcacgatctcagctgactacagcttccacttcccgggttcaagtgattcttctgcctcagcctcccaagtagctggaattacacacacatgccaccacacccggctgatttttgtatttttagtagagacggggttttgctatgttggccatgctggtctcgaacccctcacctcaagtaatccgtccaattcggcctcccaatgctgggattacaggcatgagccactactcccagcctaattagtcatattttaattagacctaattccgggctgatttttctcagaatatccttctacctgtttgcacctgtgtcatttattttgggaataagtagttttaactttaacatagactatgagttttgagttcatatcctgaatgtattttaggctttctgaaagagcagccctgctacatgctgatatggcagattgcagtctacctagtatgagagcccatcctcattaagcatagccatagggtaggaattctgcattcttcagctattgaggctttgtcatgagtctgtgtcctgagctcatggccaaatgtggcccaggaacccaggtacacacacggctgtccccctgtagccttagcttctcgctggctcctttccttgctgggatggccttctgctctggtccttagcctgctcgcctgggtccttaacaacttacccagctcttgccaggcccttctcaccagggattcctcccaagtcccctgcacataactacagcctggattctccccagctctacagcttgcagtatcacactgtctagagactcctgttgctgtgcttcacactacaggacagacttcctggcgctactaaaggcagcctagatcaacccaagttaatcacatccgcaggaacactgtgattggagctgctggccacccctgagggaaccagcccatagcccagttatctccctggccattgtgggtttcctccctttgcaggcacctgctgctagcatcccattgtgcactgatactagctagggagggttccaactccagtcatgccagcatgcacaaattctccagggatacaaagggaggttgctgtagaaaaaggagcctaactattttctgcctccactgaggataacctcagagtaaatatatgcacaacaaatgccttagtactgtaacataaaattatttgttggccaggcatggtcactcaaacctgcaatcccagcactttgggaggccgaggcaggtggatcacttgaggccaggagtttgagaccatcctggccaacatggcaaaaccccgtctctactaaaaatgcaaaaattagctggacgtggtggcacatgcctgtgatcctagctacctgggaggccgaggcatgagaattgcttgaacctgggaggcggaggttgcagtgagctgataatcgcaccactgcactccagcctgggtgacagagcaagactgtctccaaaaaaataaaataattttttagcaggcaaagtgagatacagttggctgtattaagtagtatttagttaaaatacaactctgttacctgctgcaacaaaagatatacaattacagaattattgcagcacagatctagcaccaacaatctaaaatgcagtctctaagctaaacacagtccttttacagatttaattagttgggaaattagggatgctcagggttgaacagcctgggtctgtcatggagagaatctttaaccaatagaaggcctataaggctttagaaacaagtccctcattggctttcaaccaaactgaatccattacacctgctgaatctgtccagagtccatttcttcttaggaaccactaactacccagccatccagatgtgccatgtgtattctgccacctgctttagagaaacatctggtgtctttattaccttgctgtggctaggggagttttccattcccctccatggccctctgttcttttgagtgagtgttgtttgtgctgctgcatatagattcaaatttactgtccagctttcctccactttgtgcagtgctgactcattttccccagatacttgttcctatgcggcttgctgtagtcccttgatctctcttggcaaatgacagtaaggcatttttgaagtgttggaaggcttttgctcgggctttatccagctctccccgtttggtatattggcaaaagagtcccactctgcatttgtgtagaatttacccattatttctattcctgcctttcaagtaggaaccaggttagcaaatgatagaaaattaaatccagatgatttgtggtaagaaatatgttttgtgaaaaagaccactcagtcataaagaatgctcagaattagattatgcaaatgctctgttatcacactttcaagtggtacaggcactgctgattttgattcaaggcaaggaaattctagttagctttttatttatttaatgtttctgttttaaatgagcaggagctcactaaagtataaaagaaattaggtcttcaatagggcctgcctcgtaatcacctatgtgcttcataacccaacggagatgatgaataaatttgctgtggcctcatagtttataatttacctgtgcactgtttcaaccgaaatggttttcatgctctttaatttcaggaaacctgtgatctggggaagataaaacctgaggccagacgatacttggaaaagtcaattaaaatggggaaaagaaatgggctccatcttcctgaacaagtacagaatgtgagtttatgttttcttttcttatcagaaaaaaaaaatgaataaataaaacaaaatactggttgaacatccctaatccagaaatccaaaatgctccacagtctgcaacttttgggtgccaacatgatgctcagaggaaatgctcattggagcatttcaggttttgtgggttaggcgtgctctactggtaataatgggaatattccaaactccagaaaactccaaaatctgaaacgtttcaagccccaagcatttcggataagggatacccaatttgtgcaacaaaaaacagaaaatagggaaacagatgggttgtaatagaataacctgtaatacaatgtattttgtatttagtggttttaaattctacaactcctgttaacctcatggtgacagacaaacaactgataacttaaaattgttctttaaccttgtacaagttttatttatttcatgtgtgttgagcttattttcccttccctgttttacattctttaagagctgttctcaggtcttagtagttgatttgtcttttcactcccttggtcatacagagatggggcactgattataaaatccttaccgatggagagttttaaaaccagcaccttggaatggagtatcctatgtttaacacatgccccttaaaagatgagagattagctgctgaaagatgcctctcaaactttttcttttgtctaatgccagtcaagtcttccaggttcaaaaataaacttggctccagaattaacctttttcttcttggaaaggaaatatactccatgatttatttccaggtcattcttctagccagcaggactggaaataagtttggaagaaatccaaatcaagtgttgtcagcatgttagctataaccacaggcaccactgagatatgggtacctttctcccacgtaaagccctttgatcaccttgtatcctcttccttcactgagttagaggagaaatgtgattgatctcacttacctgaccctttgtcttcctggtcaattcttaattctgtttggagcatgaacactgtattagttaagatatgtttggttgcagctaacaaaaccctgtttaaacgagagatttatttgcttgtataactagaaggtcgaggggtcggtgagctgcatgggttggtttgatcctgatgcacagtggagtcattggccaactgatttttctatttctctactgtgtcttcctcagtgttagttttatctaaagggtggcttcctttcattcctaaaatggctataaatctaaaaactccaccatccagaaagacatagagaagccaccagtaaacctctcctcatgtcttaatggcccagagtggatcctgtggttaatcctgaattcccttttagtcaatggaatacgaggcctgggttatctgaacagtcctgagggcaatgggggtggaaggatggcccaactggtgtagaagtcacacacctagagttgcagataggatcaggtcctatgtgaactacatgggcgctgcaaagtggggcagaggtagaaagggggttgagggagagtatcggaaaacaccactgaacagtgcgttaggtcagtagtctcaaatttagtgtgcatcaaaattacacggagggcttattaaaactctgattataggactcgacttttaagagtttgcacttcagtaggtttagtgtgggggtcccaagaatttgcgtttctaacaacttccctggtgatgctgatgctcctagccagggccacactttgagaagcagtaaatttcattatgtaacattgttagaagaatgggacagattaataaaattgtatctttttttttttctggtggtttccttcttattgcttcatttgatctcccacctaatactttttatgcaaatcttagagtctataaatcatctttttttacaaaagctctataaaactaaaacatcaccttttccccgaagcaacaatagaatgaattattcagctcttatctcttggtttacttcataaccagatgctgattactgaattaaaattttgaattggaaacaattagaaatttgctaattggtaatgcactgctagatttattcattcactcagaaactatttattgtgtatgtactatgtgcaatatattgtgtttactgtacctcctaaatttattcttcaaattcacaactaatttccaagacaccaccaggcttgcctttctataagtgctacacacagatacacgtggacatgacatagtggactgcagaaacctgttttatcaagcacatctctacagaagtacttcctggagtttgggcacagaagtcaatcttcatatgaaagtgaaacttactcaattgatggtgataaaaatgagttgtttttttcaaacaattctcctgcctcagcctcctgagtagctgggattataagcacacaccaccacatccagctaatttttgtatttttagtagagactggctttcaccatgttagccaggctggtcttggactcttgacctcaaatgatccacccaccttagcctcccaaattgctgggattacaggtgtgggccaccgtgcctggcaaaaaatgagtttctttttattgctaatgccctgtatttttatcttcctttcaggaaatcaaatcaatgaagaaaagaatgagtgagctatgtattgattttaacaaaaacctcaatgaggatgataccttccttgtattttccaaggctgaacttggtaagttttattatttttctagattaaatcatataatttaggcaaatagtgttacctcacagtttgttttactttccagatacaaaatttctaaatcatagttcaaataattatttaaaaaatgatccagtacctaagtccaccaccccttctacagaagagacaatcaaaccaaccaaaattagattttaggctaatgagggtatataaaatttctagagacagtccagaggggacttaataatcttttttttttttcataatttttcttggtagtttatagttgtgtttaacagccttcagtgccttaaaatttttttttgacttgcattgtttcctgcattgtatcttaaactagtctcttcttactcagtcctgggtcttttttcttttcttttcttttctttttttgagacggagtctcgctctgttgccaggctggagtgcgatggcgcaatctcgcctcactgcaacctccacctccctggttcaagcaattctcttgcctcagcctcccaagtagctgggactacaggcatgtgccaccacgcccagctaatttttgtacttttagtagagacggggtttcaccatgttggccagaatggtctcgatttcttgacctcatgatccacccacttcagcctcccaaagtgctgggattacacgcatgagccactgtgcccagctttcctgggtctttcttcacttaattttgcctgttctccactgaaacatcatttgcacaagtttactgaaacctgttcatattttgaattgccgtctcccaaggcacctggcctctaacagccaccccaattccagcaacatcaaaatgatatttaaaggattgtcattattttacttgaatttcaattactacacaaaattcctagagctaccaaaaggcaccatgccaatactaaataaaccagcaatgagtggaaaatttgatatatgagaaaatgattttttgcaggtgctcttcctgatgatttcattgacagtttagaaaagacagatgatgacaagtataaaattaccttaaaatatccacactatttccctgtcatgaagaaatgttgtatccctgaaaccagaagaaggatggaaatggcttttaatacaaggtgcaaagaggtattataaatgtttgtctttcttttgtttttaatggaatattttaagaaaagggtttactttgttcaccagtgtcaaagtcagctcagagactgatattcctgtgtgtgcactgtatctctaattcctcagacttacaagacttttagctttttcattgctcattgacaacctgcttggtgtggtcacaggataagctgttctaataaaaatagaatggattaaataaattagaattctgttgctcctctcctaaatcaacaatccagcactggtaagtcctgctttaatatgaaaaagaaaaaaggaagaagtagacagggattctcagtcatctagccagttctaccgtgatctgcctctctagctatccaagtaaccatgaggacccttttttccttacataggacccattcaccatttgttaattcccagttactgcctgaagctcaaagaccaggatctctgggtgatacagttcttcctggttgtagcttctcataatccagcaaactataaaaggaagacaagttatcagctcctcacccccacaccctcccccaacactcccagtgatggcataggaaaagaataaccgcactgaaaagtcccatttggaaaaagaaagactgggaaacatagcaagctcatagcaattttctaaaattttcaaattcctcaggaactgggaagattctgtactatggtgacgtttcttggttagcttgttggactaaacttgggtctgctttctcataagaattcctttatcaattttactccatggcccccagttttgcccacagggaattgtttttgtccattatccttgatgaccatatcttgggggactgctggtcctgctaatgtcaggtagaatcccaagggttgctttagggatcaaataatccaaacttttgtaggccagacttacgatatctttggtaatacagcctcctcaaaaatgtaggtttgttgtctgtttgctgctaatcagatgcatgtcaaaataactatacccaaatatcacttttggtcatagttcttaaacttgccaaatcttatatactgtcttctgaatttatccatctcactcttcctccatttaatgaagtctgctttcaggccctctgaacatagtgagcttgtggaggaaggcagcattctcaaattcatgtctgcagttcagtaactcggagtgacagccttttctcttaacactaggaacacagagcaattggcttttccaaccatctgaagattgtaggccataggcagaacctccctgagcagaattcttttccttccatctttagaaactggccaattctcacccaagcttatctctcccatgtaatctttcaaaaagcaacaaatgccaaaaaaacacctcccaacagtattagctttcccaaacaattcctctaggctaagactcagtaggtacatggcctgctgtctgagttatggcaagcaacagttttcacaaatgcccatggtataatgagaacctgcttcccagcctgcaatgtctgggtccttaccttccattcctgtacatttttcatttttattgttagtaccacccaatttctggtattaatctctacatatgttagggtccaggctaagggacttgacagaagtcaaaagcacagttaactcaaataagataaaagttttatctttccagaaagtagattagaggttaccagggaatggggagagggaagactgaggagttaatggttacagagtttctgtttggggtaatggataagttttagaaacagatgatggtagtggttgcacaatagaatgagtattattgccgttgaattttacatggctaaaatggcagattttaccacaatttttttttaaaagatttgtcttataactgtaagtcaagaggtgagtggtccagaggtggaagacagctctaccatcctcagggtgtggctttcagggtcattgaggtcatcttcagttcacagccagcaaggcaaagatctatcagacatgacccagaaatttcactcatcacttcattcacatcccattgtcccattgagtatcacatggccacagctggctttgaggaaggctgggaaacgtaattaggtaaccaagtgtccggcaaaaattcagagttcagccaggcacagtggctcacacttgtaatcccaacgctttgggaggccaaggcaagaggattgcttgaggccaggagttcaagaccagcctcagcaatatggcaagacctcacctctatgaaaattaaaaaaaaaaaaaaaattcagagttatattactaaaagaaaaaatgagagaacagatattgggagaaaattggcagtctagagagaagatctggagaaactgcaaaaaatgaaagaaaaatctaattaaactatttaattttagaacttggagaattacattatgtatgtttctcttctatgttttccattttagttttaaaataataataattataacagataattatatagtgtttggttatgtgccaggcatttgtctaagcactttacatatattttcatttgaatcttcatgattactctccagtgtatgtatttttattttccacatcttgcaaatgagaaaactgagggtcagaaagctccagaatttgcccaagatcaggtaactagtaaatggtggaaccaaattttgaatgcaggtagtgtgacctcagtgtgtgattttccttagaaaccagtctataaataatttgctgatttgattattggaatcagttttttcttttactttaacatttacttacttcctctaggagaattacttttatttcattgctaagaaaataataaaataatatcaatttttgtatttttaatacaaataaaatataaaagatatttgtaatgttaatttgggaaaaatccctgaaacatttttaaaagcagaattttatggtgccttagttcatttgtgctgctataacaaaataccacagacgaagtaatttatgaacaatagaaatttttcacagttctgaaggctgagaaattcaagatcaaggggcatcggcattcagtgtctagaaagggccttttttctatatcctcacatggcagaagggggaagggcagaaaaggcccaagttctttagctgtagcccttttataaggcactaattcattggtcaattcccaaaaggccctgccatttaacactacctcaaaagggattatgtttcaacacatgaattttggggaacattcagaccatagcatgtggcattaagtatattcacattgagaatatgtttatatttttctgcagccatcacctgtatccacctgcagagttttttcatcttccttaactgaaactctacccattaagcattaactccccattatcccctatccccaggccctggcaattactattctattctgtgtctctgtgaatttcactactctaggaacttcatataagtggaataataaaatatttgtctttttgtatctggcttatttcacttagcataccttaaagggtcatccatgttgtagcatgtgtcagaatttccttccttgtaaaggcagagttatattccattgtatatatataccacattttgtttacctgtatatctgtccatggacacttgggttgcttccatcttttggctgttataaataatgctgctgtggacatgggtgtatagatctctcttcgagtctctgctttcaattatctttgttatttactgagatgtagaattgctggatcatatggtataatttttttaggaatcaccataccgttttctacagcagctaaactactttacattctcatcagcaatgtgcaagggttccaatttctccatttcctcaccagcacattttctatgtttttaaaaatagtagccatacaactgggtatgaaattaaaaagataaattttacgttatgtgtattttaccacaataaaaatgtccaaaggaactgaaagtaccaatatttggtgcagttctgtcagtagaagtaaatatggattcgctatattccttaaaaatatattttcactctaagtttgtagcacctacaattttattaagacctcatagttctgaagtttaaaaagtcataaattgtttcagaaataaaacgaaatcatgaatccaaaaaaaaaaaaaaaagcctataacaccaaaatggaaccagaaatttaaatggtctaaaaatatttgataattttacaaacctaaaaatacatacagtaattcttccttttagtgctttggatcaaattattgattagcctttattttgttgctgttgtttattactaggaaaacaccataattttgcagcagctactcccactgcgaaccaaggtggccaaactactcggttatagcacacatgctgacttcgtccttgaaatgaacactgcaaagagcacaagccgcgtaacagcctttctaggttagttcttttttttttttctatgactgttttgctataccatgtcaaccagacagaaggcctcagaacataatatgcctttgaggacatcctacttttccttcatttgagagaagtatattgatcacctattaagtgttagatagtgtgcttggttgtagggactgcttattgtttatattgctagtataggcctggcttcactgtatcttatatcttctttaggctttttatactaattcctaacatgacatgtaggttctaacagagagttactaaagttactggctttattctcttcactagggatttagtagtcatagcatggctgcttatgaatttgtataaaataagctgacaaatatgacgtacataaaaataaaacatacataaacaaaaaacatttaatattccagaaaccacttgttaatatacaaaactaatataaaataatatacataaaactagtatctaataactaatataaaataatatgtataaaaactgttatctagtaactataatgttaaactccataaatggtacatatttgtttttgtataattcactcattcattcatgagacgtttatgaaataactattcagccttaggcagtatgctaaatagtaggattacagaaaggagtaaaacaaggtccttttggctgggcatggcagttcatgcctgtaatcccagcacttcgggaggccgaggtgagaggactacttgagacccagagtccaagaccagcttgggaaacaaagagaccccaaccctgtctctacagaaaaatttaaaaattagccaggcatggtagcacatgcctgtaattctagctacttgggaggctgaggtgggaggatcccttgagcccaggagttcaaggctgcagtgagccatgatcatgccactgtgctccagcctgggtgacagagcaaaatcctgtctctaaaaataaaaataattttttaaaaagagacaaggtctttttctcaatggatttgtcacttactagaaacaacagaagtgtgaacaggtaattactctacagtctgatgcatggtatacaagaggatggctcagagagttaacaggtttgtaaagaatgtttccttcagtggtgattgcatacactaaaattttccttagtaaccacctgattaacttaattcatttaaaggagttttccttctaatttgagattggcatattcctatgcaaagtgtcctcttgagaggctaaagtgcgaggatcccttgaatctgagagttggagtccagcctgggcaacatagcaaaactcactcactctctctctctctctttatatatatatatatgtatgtgtgtgtgtgtgtgtgtgtatacatacatgcgcacacacagacacatgcacgcacacatgcacatggatatatatatggaaaactatatctttgtatcctccatgagtttcctcacttctcttcacggtattcctcgggctgctcctccatctctcacattgtgaggttgccttctgaactgccatgtcctttgcagagccaggcatgtttttatcgtaacgtatgtaacaaaatgtaaaaaataaatacataagaccatactcatttatccaaatacagtaaagtgaaaaattgaccacagcaatataatttgtggttctcagaagtttctccagctaaaaactggaattgctgtgtccagataaaccttcacagaaatggggtaatgagaaactaaacccagtgataggaatttctagataacattgaccacaggtcacatctgatgtgttttccctagctttcttaggagtctgactgtcttcattgaagaataatcatgtacatgactttagtttcactagtgcttttttccctgaataacattcttcagtcagcgttctctgagataaacttgagctttggtgatgaattgaggaactcatggcccagttctgggggtgttaaaagaaaaaggggctaggaccataaaatcaataaccccgaagagcaaagtgtgcttccataatacagcctgctttcctccctcacgtttttcctcctcctttacctctttccgccttatttatctgtattgagtactgcaaaggaggaagcaccatgctaaaacacaggtggtatttatgagtatgcttgcttccaaaagcaagtagatcactaacttttccttttccttacagatgatttaagccagaagttaaaacccttgggtgaagcagaacgagagtttattttgaatttgaagaaaaaggaatgcaaagacaggggttttgaatatgatgggaaaatcaatgcctgggatctatattactacatgactcagacagaggaactcaagtattccatagaccaagagttcctcaaggaatacttcccaattgaggtggtcactgaaggcttgctgaacacctaccaggagttgttgggactttcatttgaacaaatgacagatgctcatgtttggaacaagagtgttacactttatactgtgaaggataaagctacaggagaagtattgggacagttctatttggacctctatccaaggtactgaggatcacgttgttggaagggaccttagggattcagctatgcctactttaagactctactcttggccaggcacagtggctcatgcctgtaatcccaacactttgggaggccaaggtgggaggattgcttgaggctaggagttcgagaccagcctgggcaacatagtgaggccctgtctctacaaaaaatttaaaaattaggtcaagtgtggtggctcatgcctgtagtcccagcactttgggaggccgaggcaggtggattgcttgagtctaggacttcaagaccagactgggcaacatggcaaaactctgttgctacaaaaaatacaaaaattagccaggtgtagtggtacatgcctatagtcccaggtacttgagaggctgaggtgggaggatcacttgagcctcagaggtggaggctgcagtgagccaagattgcaacactgcactccagcctgggtgacagagtgagaccctgtctcaaaaaaaaaaaaatgaaaaattagccaggtgtggtgtgcacacctgtagtcctagctgtgctgaagcaggaggatcacttgagtccaggagtttaaggttacagtgagctattatcacactgctgcattctagcctaggtgacagagctagaccctatctctaaaaaaattaatttaaaaaaagactctactcttccatatttctcacatgggcttcttagtatacagatttaaaatgtgggtctgaagccagaatgtctggcatcatcatttactaggtaggttacttaatttttctgtgccccagttttcttacctatattataggtcctataaactgggaatattagtagtacctgctttgtatggtcactgtaaggattaaattggttgaatacatgcaaagcatttagaagactgctcagcacatagcaaaggcttaatcagagttagctgctaccattgtcattatcatcatcatctagtttgtgcactacatttacttaattgaatattgaccaccacccagacatggtggctcacacctgtaatcccagcattttggaaggctgaggtgggcagatcacttgaggtcgggagttcaagatcagcctggccaatatggtgaaaccctgtctctactaaaaatacaaaaatttaacaggcatctgtagtctcagctacttgggaggccaaggtatgagaatagcttgaaccctggaactgagatcacgccactatactccagccagggcgacagagcaagattctaactcaaaaaacataaataaataaaattgagcaccaaaatatttattagataatctgtctgccaataatctatggccactcccttcagtctggctgagaggcagcacagtttagtagaagtagcaaaacctttgcagtcagtcagatttgagtttgaatgcttgagtgacataacctctttgagattctgtttcttcctctgtaatatgggactggaaatccttttacaggattgttttatgcattaaagactatatgtgcaaatcatcttccccagatatcagtggtaacaattataaaaatgttataattgtgtctatagcatgtaataactatagattccatagtgtttcatcagatacaaaaggatttggatctctttctccccaggctactttctaaagcaaagtcaacctcttacaattactaatcatttaaatagatcaaaggagagtatagtatccccctcattcagtaatacacacaagtttgtaatccactgactttgagtgctgaaaagtaggttgagtaactgtgtcatctagttggtgggcagaagtgtcttttagcacctaagtgattatcctggtgtattagtcctttctcacagtgctgtaaagaactgactgagactgggtaatttataaaggaaagaagtttaattgacttacagttctgcagggctggggagacctcaggaaacttacaatcatggcagaaggggaaacaaacacatccttcttcacgtggcggcaggaaggggaagtgccaagccaacaggggaaagccccttatgaaaccatcagctcttgtgagaactcactcactatcatgagactggctaccccatgaatcaattacttcccactgggtccctcccacgacacgtggggattatgagaactacaattcaagataagctttgggtggagacacagccaaatcacatcacctgctgctttatggacttactttcactaatattatgacctaaaagtaaaaccctgccaaatatagatgagtcttatttttaaataaaaagtatcaggatatagttttaaccgaagaactctttcaggagtaatcctttaatattggagtctcctataactgtcctcagattttctttccagcgtcaaataacaattcttgctacctcattctgctgtctcactgccaggatataattaatttcttttgtactgagagatctggtcattgctaccagcaccctggtgtgggtaacagagagtaatctttgtgaaagtagtgacctagttaatacttacttcctgtcatcttaagatgttctcttcataaaggtaaaagggattaacttgttttatttgtctaactgacttttaaaaagggtattcagaataggttttaaaaagaccaggtactgtctgggtgcagtggctgtaatcccagcactttgggaggctgaggcaggtggatcacttgaggccaggagttcaagaccagcttggtcaacatggtgaaaccccatctctagtaaaaatacaaaaattaggctgtgcacagtgactcacacctatagtcccagcactttgggaggccaaggagggcagatcacctgaggtcaggagtttgagaccagcttggccaacgtgggaaaaccccatctctactaaaaatacaaaaattagctgggtgtggtggcaggcacttgtagtcccagctactctagaggctgaggcaggagaatcatttgaacccaggaggtggacattatagttagccagtatcttgccaccgcaccccagcctgggcaacagagcaagactccgtctcaaaacaagagaacaaaattaaccagcgtggtgttgtatatatgtaataccagctactcaggaggcagaggcaggagaattgcttgaacctgggaggcagaggttgcagtgagctgagatcatgccactgcactccagcctggatgacagagcaagactctgtctcaaaaaaaaaaaaataaaaagaccaggtactattagtcttctgagcaaaagaaaagggggaaaggacacgtactcccaaaatgaagtctgatagcttttggagaatgaagtctaatagcttttggaaagaccacacagatacgacactgtacaagaatagtctaattgatagtataatttatgcattttcccaggctaactaaaagcattctgtttcaaaaaggcctgtctagtttataaaagaagcttatttaattgtgattactgattctttcctcctcaaataaaaggaaaaaccttatcgtcagaaattcagttttttattccgattttaatgaaaaggctgcctagtgagtcaaactgtatcttttatttcaaatgtgggtttcagcattgtttagtgtttagtaatcccatctttgaaaaagaaaagtagaacctcattaaaataaattggacattcagctgtcggtgtgacatgcattcttcattcttacctcgagatttttcaataaaagaaacttcggagctcacacagaatgttagtggggttattgtttgtttagctttagtttttccattttagcaaaataacctactttctaaaaggtaaattaatgtttaaaggcatctctggtaacagatatggcttaatgactggaagaggccatgccagtgtagttgctagaggagaattttcctatgttgccaacgcgtgtttctggctcctagggaaggaaaatacaatcatgcggcctgcttcggtctccagcctggctgccttctgcctgatggaagccggatgatggcagtggctgccctcgtggtgaacttctcacagccagtggcaggtcgtccctctctcctgagacacgacgaggtgaggacttactttcatgagtttggtcacgtgatgcatcagatttgtgcacaggtgagttttttttttcccccagtaaacctgccaattagtttttttagaaaacttcttgactgctgtcaggtttctgctcctaacaggttttttcagaagctgaatgtgttcaagaattttataggccttctgcaaaaccaaaattttccttatcctgtcctctttcacaacatatttttacttggaggttcatctaccagtgaaagatgtttgttgaataacagcctatggaaaaagaataagactatctgtaaggaaaggttacaaatactttgctttttccttttaatcctttaggaatttgatataaatttctcagaaaaactgtgctgtaatctgtctcttctgcttatcaatgctttgtttactttagtggtttttcaatcctcttagaccctttactcatttttaaataataattttgtaacatttgcctttactaacttcaaattaaaatcatagataatatagtctaaccatgcaaagaatttgccagagtggaggtgtatgtgtgcagtagattaaaactgatttttttatttctgaaaataaaaagtacatttattctcaactttgtaatacagtccatttaattaggcccagactattctagcatgaaccatatgaacttgctaacatttaaccattattaacatatgaaaatgtctagttcagcaattcaccgtaatagttgaaatatactgttatttggctgggcatggtggctcatgcctgtaatcccagcactttgggaggccaaggtggaaggatcgcttgagtctaggagtttgagaacagcctgggcaacgtggtaaaacaaacaaaaattatccaggcatggtggtatgtgcctgtggtcccagctactcgggaggctgaggtgggaggatcacttgagttcaggaggttgaggttgtagtgagccatgattgtgccactgcaccacagcctgggtgacagagcagaccttgacttaaaaaaaaaaaaaagaaaaccacccaaaaaactgatagtaacagaaatgaaggtacagttttccaaatttgaaatctctgtatgtctctaaaggtagacttaaaaaacaacaacaacaaaaacaaaaacatttttattaggatacttttagattcatagaaaacttgcaaagatgatataaggattgcctgtatacccctcagcctctcacccctacttgtaacatcttccattccaatagcacatttgtcatagctaagaagccagcattgatacagtactccagactgaacaccacagtttatttggattttactagttttccttaatggtctttatacagagaatcttcttaaatccatacggtgtcctcactgaatataaatagaagaaatttttgtatttttcaagtgataatgcttggatatgactatgcagtaagacataatgaagtatgctggaggtttgcactgtatggaagtaaccctgaatggagcagcagcaagtgcaaactgatggaagtggtttatgttgtcagctcaggtcctagaacagtgctgacaatggtggcatgaggttccaaaatgatgaacacctcctgggaaacttcaaaagaaagtaatctcacttcaacttacacagtagatcctagtacttgtagtcttagaaattaaaatggtgtaaaaaatgcttcgcaaggctaggcatggcagctcacacccacaaccccagcactttgggaggccaagggcggcagatcgcctgagctcaggagttcaagaccagcaacattgtgaaacccagtctctacaaaagatacaaaaattagccaggtatgatgacacacacctgtagtcccagctactcagaaggctgaggcaggaggattgcctgagcccaggaggtcgaggctgcggtgagctgtgatcgcgccactgctctccagcctgggtgaaaaagtgagacccggtctcaaaagaaaaaaaaaatgctttgcaaaaatatgtacagtggggttagtttctcggtttagttacagctagtttttttgatttatgtgaatagtccagcagggggtatgaatgacgagcaggatatggaacagtctttttgttgtcctgacatgtgcagaatcagtcctgtgcatccagcatccctatatcccagagtagccctaatcattgtaataacccaaaatgtacccattcatttccaaaataattctgtcacctttgtttaaaaactggttctttcaacattttatctttaacctggtgcttccatcttttgttttaaaaaacagaggggaatagtatatgagtatgtccagagaaatgtcctgatatggccatttttaatctctctttaatccaaggaaaataaatctttcagaataatctttctttcttaggtgtttttaaaattcattttcatagcactgactgggcgtggtggttcatgcctgtaatcccagcactttgggaggccgaggcaggaggattgctttgaccctaggggttcaagaccaggctgggcaacatggtgaaaacccatctctaccaaaaataaaaaaaattagctgggtgcggtagtgtggctaggctttgcaaggctaggcatggcagctcacacccataaccccagcactttgggaggctgaagggggaggatggtttgagcctggaaggtggaagttgcagtgagctgagagtgtgccattgcactccagcctgggcaatagggccagagcctgtctcaaaaaataaataagataggccaggcatggtggctcacacctgtaatccaagcactttgcgaggcccaggcaagtgggtcacctgagggcaggagttcgagactagcctggccaacatggcaaaaccccatctcaactaaaaatacaaaaattagccgggcatagtggcacatgcctgtaatcccagctactcaggaggctgaggcaggagaatcgcttgaacccaggaggcagaaactgcagtgaaccaagatcgtgccactgcactccagccagggtgacagagtgagactctgtctcaaaataaataaataaataaagtctattatcatagcactaggattcctgaaatatttatcgtgtggaccttctatcaatgtccacactgtggttgacatttcctttaattaggataactccagtttacatttaaaaaaattttttgtaatttagaagtcaaaaatatttttcttaattttagacttatggtatattacttatattatccaaaatccagttatatgtttgtacatagattaataatgacctgcttttaaaatagtggatgctcacatttttggatctgaggaccctatgaaaatctgatttatgctgtgggtacctcttgtagaaaaatacacctacaaatatgcatgaaattccaaaaggctcacagacccctcgaagccctcaccataatgaatctcaagttaagaactcctgagttatagcagtttccttcttatttgatgatttcacaaggaagcattttggtcttttaatcacatttattaagataatagtgatcttcaaatagggttttcagtgctcttgatgcatgttcgtttttcaggcacagtcctcttatcaacttattatcatatgcttaccatgtattccatcagttctccacaactcattccattgttcccattatttcttacattaattgtgatcttttgagatagtcactttagtactagaaagatcttttcttggtactctgacattttagagctgtctgactcgtgactgaactattaatatatatattgcattcaccagcttagtgtttctctcttgaaacagtagacatattcagttcttaaagttttgcctaacctcatccatgagcacaaatgtgtcatactgatgaataatgtgttggtacaattctttacttggtcatatcttcatgagattatctttgaaaaatctcttcttgtctattaatcctttcagatagcctgtaatattttaagaacttttaaggtcatcacaagtgatcactacttttgtttttcataggcaccgatccatatatttgcaaatttataatttcaaagccttttgtactgacctaaaatggatgatagtgaaaacagagattgacaacttctatgttcactaatacttccagcttacctaagaaacatatagtgaattaaaaatttgccatatgtattcagtacattggttttaagaaatggcagctcagtgtttgagctctccactgtggcagttggcaggtttcatgactagaagggctcgtttgagcttgtcatcgtaatatttaaacatgttggcaagaacatcccgttttcaaacatgtagatgcactagttcaatatgtctgctatctcttcattcaggacgtgagtttcactcgtattacgtttacagggtaggtaggtaattttgaagatagcaatcaagaggtgatatctgtagtatctgttcctgttgcatggctttattgtggtttgagctgtcagtaatcactagcctttgaacttctgtagaatagtaatgcctcttagcctccattgtgatgtctgtgttgtgttgtacattaagagcggtgatgaattttgaactgtaaagatgtcgttattctaaggaaacacataagaattacactaaagccttcttaattaaacgtgaaagggatgggcagaagaacttcaaattgtgtgacatgaaatcattaatttggttaaaaactaataaataaagcagcttgtctgctctaaatatttggattagattctgctgtagataaatgtaccctgtattagtcaggaaggcaccctggtgttatgacaagagcactggatcaaacatcatttgtgtatctgtggacctggctgtatgacttggggacagttatttaaactctttgaaccatctcatttttcttattcagaaaatggggacaacagcaattctatgtacttccctggacgattgggagaattaaaccaagcatatgtgaaaaggcatttggaaaagcataaggagccatatgtacgtgaagtattcttgaaactatgcttatgtataattcaactcttttgagatcaatatacaactcaaaactagaaagggggtaaaaaagaccatctgccctgagacaatttactgccacttgaggttcaacagaattcacaaatgcttaccttcagtgggttttgagtgaagatctgtggaaggtgattggaaaccctcacgtttgtatttggttctgttttgttttcatgattgctgcctacttagaatttgatacctgaaacagtaacagaaagagcagcttggagtattgggagtgatggaggattagctgaagagcaatgtgggtatgtttatctccagtattaacccccaggaagcgaaagacaagcgaaagacaaggttagaccagccaagaccatacctagtcaggcagaatatgcaggctcagaagaagataggcagctgagacttactgaacatgtaccaggtgccaggaaatatacacactgctttacattcattcatttttatcttcacagtacgctctgaagtagatgggtactgttattgtccccattttccaaatgaaaaatctgagacatagaaggacctgcccagggtccaatagtcatgacctaactgctctactttattgcgtatttgcgctcccattccatgcactggagacaatactattattcatggtctgaatttggtcttccaaatgtgttggatgggcttccttctcctaagtttattaaatgacactctaataatgtagaatgaatgcaaatgtggaatgaatgcatttatttatttctaggtttccctctgtgtgagttgactgttgaggtttcagtcctaaaatgcagtgaactccctatcatcagctttgtggcctctgctgtcaccctgtctccctagccccaactcctgcacactgttttagtttgtgactttaacatcagatgtaatttctttcaagatcttctttttgttattttatttgtttgcttatacatatataaacaatacatacatgtgtaaataaaataaatgaagtcataaaccaaaatatgaatgtattaatgcataatgtttatttgggaatgtgcttatttctttcatttgcttagtgcattttctacatgtattattttttaaaaatcaaaatattttttaaagagagggatgtttagttttttgtttgtttgtttttggagacagggtctcactctgtcactcaggctggagtgcagtggcacaatcatggctcactgtagcctccacctctccaggctcagttgatcctcccacctcagcttcctaagtagctgggaccacaggcatgtaccactacaccagggtaatttttgtattttttgtagagatagggtttcaccatgttgcccaggctgatcttgaattcctgggctcaagcaatctgcccaagtcagcctcccaaaatgctgggattacaggtgtgagccaccatgcccagcctatatagttattttaagaaacagaattattgactatgtgtctgacatgtcatattacctatggtaggatggggttcaaaagaaagaaaagttatagtatcttgaatgttcagaatttagcttgaggacatgaagtgcaacaaataaaaaattaaaagcataatattaagtaaaataataaaagtagaattttaagtattgaaaaaaagtagagaggtgagaggttgaggtcaagaatgataacaagggaaaatatctttgagttgtttaagtttgaatcttcatacagaaatattctccccagggcttcatccatttcacagatatttattggacatcctctactttctgtgctggattttggaaatacagtggtgaataaagcatactctctagcatttgagtttgaatagtacctttatttgttttcatcttaaaaagaagcagtttaaataagatgtacctgatcaggaaggtacagctagtttgggagcaagcctgtgaacttaatatgcagtattcaaaacttctccaaattatgttatttcctgggtcctttaaaggatgatggtgatactgaactgttgaactatagggcagttgtgaagataaagaaggatgtcaacacattatctttattactattatttccagtgatcactcggtatgtgtgaagttaaaactatggccttttaatcatctgtttatggcaaagtctagtagatagtggtcactttaaaaaaaaaataccttgccttgttatataaacttctccatcatccctggatttagggatagattagacaggccaggatgtggaatgactgctaagaaatcagtactggatcacctcagacagccaatgtcaggtctcctgaggcctgtcctttttcatgagcacaatacacttattgatttcagcaactgccttttctttgagttgggatttgctatcatggaaataacacttagttgtagccattaaaagcaactgttctcttaattagaacagtcacatgtaagatttaggcctttaaatacagcagaagctcataggacttccgaagcttcaatttatatgattctgttcctgttcttattgcactgtaggaattgcaaagttaatctctatagcatcaagttatctgttgtaaaaatctgaaacagagtacattttagacatcctattgtttgtttaaaagatagtaaagacagccaggcatggtggctcatgcctataatcccagcactttgggaggcagaggcgggcagatcacgaggtcaggagatcgagaccatcctggctaacacggtgaaaccccatctctactaaaaatacaaaaaattagctggacatggtggcgggcgcctgtagccccagctactcgggaggcaggagaatggcgtgaacccaggaggcggagcttgcagtgagctgagattctgccactgcactctagcttggatagtgaagaaaactctcttatttatttatttatttatttatttatttatttattttgaggcagggtctcactctgttgcccaggctggagtgcagtggcatgatcatggctcactgcagcctcagcctccaccttccaggctcaagcgatcctcccatctcagactcctgagtagctgagactacaggaatgcaccaccatgcccagctaatttttttatagtttttgtagagatggggtttcacaatgttgcccaggctgatcttgaactcctgagctcaatcaattctcctgcttctacgtctcaaagtgctggaattacaggcatgagccactgtgcctggccaaaatcgtgtatttagacaactgtcttcctctcaagaacttctaaccaaacaggaatctaagtttacattgttttctaggcttttgttatctaaatatttcctgcagcaaaaaaaatgccctaaaactctttgaagtgtcagctacaaaaaatatttgttaattggattattttgtgtgttttttactgctttatctgggaaatacattagcatcaatagttatcatggcccataagcaactattaccaacaccttcaaattgtttgcattgataactatatgaagtacttttttagggttctttggattatagtttaaaaactggggaatggtatttgttggctggtcaacagtgagtaatggttcagcacccatgctgttttgtataagatccattaggctgctagattgtgagtcttacccatggtttctgtgtggacatacacagtggctgactgcattcctttctcttgagaattcggttgtttgctgcaaattgagctttcaaattttgtaggttctttgtcctccttttttgaaaaatatttaaatgatgttgcccaaagggctcacagagaaacagcatgaccaactttcgggaaattagtaagcactagggttatttttagctttttctccttacaaacatttccttttgttctttagaagacattgttgatctttcattcatttgctgtgctgtctccccagctacaaaatggcttttgaatagaataagcgctctcttctctactctgcatgacattaactgtgttcttattttattcagtttttactctagctcatgaattatcatttgtgtattttttttctggatattgaatcctcccctacacacacaaacacacatacacacatttttgttgtcatttggggttgacttcctccctcatatgcaactaatgactgaaaaatcttcatacaagcaggatatacaaagtctgtatttttgtcagtatatcatatggtggtggctgatggtgtgatttggcctttatttgctgttagtacctatttaaaaaccatcaccttgagaaaattgtgcagtagtgtcacgggatccttggggtgtcgcatcaccagccagaaacctctgtgaccagtggtacctttgcccaggttttgcttgggcccactgggcccactcagcctggcaggctgcactcagctcgcactactggcctggatcccatgcctgccaagggcaagtggagtggcaaggggtgcatgagtgagcaagcatggggtccagccactgcacacagccaggcatgctggctatggcggtgcaagcagctccaggtgccagcacaggcgctggaggcaaggctgcctgcaaggctgcagccggaccaggcgtaccacaagcagctttcacagctggcactggggaacacagtggcacccagaagcttagagacgctgggaaccacatagccccaaagaaggtatcacagccctagctcagggagctcctaggtctgggttccctgaagggccacaactcttctctccttgttgcccacagcatggcgagcaaggggcatgtttcagccctgtttgtgttatagccctttaggccccaccattcggcaggtcccgagttcctgtcccgtgcccaggaagaaggaggtatacgaacaagtggagggtgagcaaggcaaagaggagctttactgagcaatagaacagcttagaggagacgcacaatgggtagctcctctccacaaccagggtgtaccaatgtgagtgttcagctatcagcagagagtagaccctggagtggatagctcctctccacaggtaggtcatcctgtagagggttcagctctcagcagagaagagaccctggggtgggtagttcctctccgcagctggtttgtcccaccatcttttcaactttcagtatagaggagaccctgggatatgtagctcctctttacagctgatcgtcccgatgtctgctcagctgtcagcagagaggagaccctggagtgggtagctcctctctgcagctggttgtcctgacatcagctcaagtctggctgagtccagtgtttttatgggcttcagaggggagaacgtgcaggctgattggcttatgggtgggcctggcaaaagcaccataagttcccactctggtctgcaggactggcagcctggcccccaggcttcaggccttccctggcttgaaggtggggcttcaccagggacccacccctttctgcccaggaacctgtctgcctgctaccactgtttatggtgcccaggctgttcatgcagaggggcacctgcaggccagtgccaagccacgctcagttcccccctcagcttccctcccatgctcgtcagtgcccaaagttcagtaggggctgaggcagcaaggggctggcatgtcagtgctgtcctgagcatatggacacctggccaggttgtgacagtgcctgggattgacctcagctttgctccaagatcagagcaggtgccgctaatgggttgggggagcttccggggcccctgagagtacagagatgcctgggtccgcagccatggctgggtagctgtagctacacccaggagggtggggctcctgccttcttccagcccctaagagtacagggatgcccaggtctgcatctatggcttaggaaaccgcagctgtgcccaggagggtagggctcctgcctgctcctggcccccaagagcacaggcatacctgggtcagcagccacagcttgggcagctgcagctatgcccaggagggtgaggctcttgccctgccaacttagaagggggaaggacttttctgcctgttcctggctcctgccagctccatggagcgcacagccccagccacgcttcccccactgcagccgagatgggccaccactgccatcagtagtattgcagaatcgcaagttcaggatagatggttacaaaggctggtctttacacttcagcttcatgtttgatctttgaaaaatcttccagtataaagaagaagtcaaatttctaaggaagcacactgaaaactcactttaactcttcacataaaggagggtttgatataagacttttgtattttagatcccatccaagaggatttagtcattttgtaatatcatttaaccttttttttccattttactctaagatacggagacagttagcatttgtggttaagattgtgggttatgaagtcagactgcctggtttcaaattgaagttacatcattaatctctgtatgctttagtttccttatctcaaaaagggagataatagttacttcatacaattattttgggatttaaatcagataatccatgtaaagagcccatgatatgagcacacctcattttattgtccttcacttattgtacttcacagatattttgttttttacaaattgaaggtttatgtcaaccatgctttaaacaagtgtgttagtgctgtttttccaacagcatgtgcttacttcttgtctctgttcacgttttgggattctcacaatatttcacttttttctttgtttttgatggagtcacaccctgttgctcaggttggagtccagtggtgcagtctcagctcactgcaacctccacctcctgggttcaagcaatctcctgtctcagcctcctaagtagctgggattacaggcacataccaccacacccagctaatttttttttgtatttttagtagacatgggttcaccgtgtgggccaagctgatcttgatctcctggcctcaaatgatctgcctacctcggccttctgaagttctgggattacagatgtgagctaccacacccggacaattttttcattgttattgtgtctgttatggtgatctgtgatcagtgatttccttttttatgaaatagagacagggtcttgccatgttgcccaggcaagtctgtcagtgcaatttttccaacagaatgtgctcccttcatgtctctatgtcacatttttgtaattctcacagtatttcagacttttccattatttttatatctgttattgtgaccagcaatctttgatattactattgcaattgttttgaggcaacacaaatcatgctctttataagagagtgaacttaattgatgaatgttatatgtatactgactgctccaccggccatttcccatttctcaccccctcttttggcctcctatctgagactcaacaatgttgaaattagattagtcaataaccctacaatgatctgtaagtgttcaagtgaaaggaagagtcataagtcttttgctttaaatcaaaagctagaaatgatcaaacttcacgagggaggcatgtcaaaagatgagataggcctcttgtgccagtcagtcaagttatgaaacaaaggaaaaagttcctgaaagttattacaagtgctactccaatgaacacacaaataataagaaagcaaaatagacttgttgctgagtggagaaagttttagtggtctgggtagaagatgaaaccagctacaacattcccttaagacaaagtctaatccagagcaagaccctaactcccattctatgaagctgagagaagtgaggaagctgcagaagaaaagttggaaggtagcagaggttggttcatgagttttaaagaaagaagctgtttccataacataaaagtgcaaggtgaagcagcaattgctgatttagaagctgtggcaagttatccagaagatctagttaagatcattgatgaatgtggctacactaaatgacagatcttccatgtagatgaaatagccttctattggtagaagatgccgtctaggactttcaggaatgctagagagatgtcaatgcctggcttgaaagcttcaagggacaggctgactctcctcttaggagttaatgcagctggtgacttgaagttgaagccaatgcttatttaccattctgaaaattctagagcccttaagaattatgctgaatccactctgcctgtgccctataaatgaaacaacaaagcctggatgacaacacatctgtttacagcatggtttactgactattttaagccactgttgagatctactactcaaaaaaaaaagattcctttcaaaatattaccactccttgacaaagcacctggtcagacaagagcttggatggagatgttccagaagattatgttgttttcatgcctgctaacacaacagccattctgctgtccatggatcgaggagtaatttcaactttcaagtcttattattatgagaaatacatttcataagactacagctgccatatatagtaatttctctgagggatcttggcaaagtacattgacaaccttctggaaaggattcaccattccaaatgccattaagaacatgcatgattcatgggaagagatcaaaatatcaacattaacagaaatttgtaagaaattgatttcaaccctcatagatgactttgaggaaggggttcaagacctcagtggaggaaggagctgcagatatggtagaaacagcaggacaactaaaattagaagtggagcctgaagatgtgactgaattgctgcaatctcatgataaaacttaaagagatgaggagttgcttcttaaggatgagcaacagaagtgacttctttatatgcaatctactcctggtgaagatgctatgaatatcgttgaaatgactgaccacgaaggattttagaatattacataaacttagttggtagagcagtggcaggtattgagataattgactccaattttgaaagacattctgttgtgggtgaaatgctatctaacagcatcgcatgctaccaagaaatctttcatgaaaggaagattcagtccattgatatggcaaactgcatctttgtcttattttaagaaatagcggctggctgcgttggctcccacctgtaatcccagcactctgggaggccgaggtgggtggatcacctgcggtcaggagtttgagaccagcctggccaacatggtgaaaccccatctctactaaaaatacaaaaagtagccgggcatgatggtgcccacctgtagtcccagctactagggaaggtaaggcgggaggatcgcttgaacccgggaggcagaggttacagtgagctgagatcataccactgcactccaacctgggcaacagagcaagaccctgtctcaaaaaaaaaaaaagaaagaaagaaaagaaaaaaaggaagaaggaaattgccacagccatgccaaccttccataattacaccctgatcagttagcaccctgattataactaccaccatgatcagtcagcagccatcaacattgatggaggcaagaccctccaccagcaaaaaagattatagcttgccaaaggctcagatgatcattagcattttttaacatataaggtgtatacattgtctttgtgggtgtttttggttttgattttttttttttctttttttgagacagagtctcactctgttgcccaggctggaatgcactggtgctatcttggctcactgcaacctccacctcccaagttcaagcaattctcctgcctcagcctcctgagtagctgggattacaggtgcccgccaccatgcctggctaatttttgtatttttagtagagacagagtttcatcatgttggccaggctggctcgaactcctgacctcaggtgatccacccacctccgcctcccagagtgctgggattacaggcgtgagtcaccgcaccagccatgtacattgttttttagacaattcttttgaacagttaatagactagagtataatgtaaatttatagactttcatctgcactgggaaatcaaaaagtttgtgtggcttactttattgtgatattcacttcattgcagtggtctggaactaaacccacaatatctgtaaggtatgcctgtaatgcctaacataggaaagtctcaacagatgttagctattattattgtataagattgttttatttatgatataagatgtaatcttacactatcatataccataatgagataaaatattcaatttctggggacccttacctctttccctgcaagattttttttattgggatgtcctcaatagaggtggcttaattccacaactagtgaatttagttatccttgcccctttaatatttgcatctcttcatatctagaatcggcacaattataatgagaaatcaagcaaaacatttttttgcataaagagaggaaggcagaatgtgagatggcgttgacatctgtgcctctgccctgggccaaaaagcagagtgggtatttgctgctgattcggcaccccatctgctgccttctctggtggttacatccctcttccctttcccctccgtgtggagccccagggatgatgaagtcagggagagaaggatggaatgtaatgcatcagaggagaaaaacaggacagaggttcagtgaaagacaacggaatgaggagccccattctgcagatgacccagtaggataaatgctgtcttctctgccaatggcagttttacaagtgtttgaaggactgtgtgaaggttaaaaaaacactagcctgttttagtgaatctctgtttttctacttgagagcttttctgacgtctgactcaagaatttactaaacttggtttcattaaactctttttaaacctcttttgtttttttaactcttagctcaggccttcagaataggtcgtttgtttttaccaggagtgctccaacttttgaatacatccgttgtttctcttttcctatagcatataactcactccacttgccaattaatttacaaacctaactcctactaaagcagcttcttattttaaggtaacattgtctacccaatctgagaggtagaaatctgactttctacaacatggtaatcttagaaccactcatttaaagtttaaaatgcaaagcatcgcacactcaaagtctataatgttgtgatttaactctttaattaattttggttaagacctaagtagttaagacctaagcaatagagtgatgagtgccccagaaaggcatggattgagacctaagcaatagagtgatgagtgccccagaaaggcatggattgagtaaacaaaagtaagcaattggaaggaggagctagggagaaattgcttgtttaatggatctcttcatttttaatggaaaattctttaaaaatacttctgctttcaaagcttaaggcttgtttttagcttagactgattgtatttttcagttctggttttctgatgattgttccaactttgtctacaattcaaaggaatgaaattactactgtaatatagagtatttgggggttgtttttcacactgttcagctgctgtgttttattttcacttgactatgaggttattctaacccctcattcagaggaacagttgagtctgattctgccttaagttttcgtgactcttaataattattcattgcatatgtactttcattgagttctttaaaaaaattctctgtgtttgctttctagactgattttgcacgatttagcggaacaaatgtggaaactgactttgtagaggtgccatcgcaaatgcttgaaaattgggtgtgggacgtcgattccctccgaagattgtcaaaacattataaagatggaagccctattgcagacgatctgcttgaaaaacttgttgcttctaggctggtcaacacaggtatgacttctaattttaaaaaggaaaataaattagaatctcttaatgtagaattgctgtcaccttcttctgtagaacttattttcattttaagtggtatcccaaccgtgctagcatgaggagtgaagaacattaaatatattggaataggaaaccccggaattttgtctgaggcaaaaaaccacatctccttttaaatcttaagtagaatgagatgtcctgctcccattttgtgagtactactggaatctgtttttggaatctacaatcttgtgataataaaacacacagttctgtcttcttcaaaacatgcccaaacattcttatgttattaggtcttctgaccctgcgccagattgttttgagcaaagttgatcagtctcttcataccaacacatcgctggatgctgcaagtgaatatgccaaatactgctcagaaatattaggagttgcagctactccaggtatgtaactactatgaattgagttcatttctctgtgaagcacagggcgttctcctaacactgcaggggagatggagtttgtcagacagattacctaattgtttctgatttctgtaatcaggccatgactttcagataagcatactatgtccttatgagttatcccgtccaaatgcgcttgaaggaaaggtggctccagatctgcagcattttagtgtaatcaggcatgagcagttggcctccgccccagagctgggagagccattcgtgttggcagcacactctcagctcctccctccctgtatgcatcatgacttccctgtgattttcaggaagaaattggcagaaggggaactttttaagttttttttcctttacatatagtattttgtttattttttccatcccctcaagcatttatcctttgtgttacatacagtccacttgcactcttttagttatttttaaatgtacaattaaattattattgactatagtcatcctgttatgctatcaagaaggagcattttcaggcctggcatggtggctcacacctgtaatcccagcactttgggaggctgaggcaggaagatcacttgagctcgggagttcgagaccagcctaggcaacatggcaaaacccgtctctaccaaaatacaaaaattagccaggtgtggtggtgtatacctacagtcctagctacccagggggctgagttgagaggatcacctgagcctggggaggttaagcctgcagcgagccatgattgcaccactgcactccagcctgggtgacacagtgagaccctgtctcaaaaaaaataaagggtatttggggggagaagcatgaacttcaccttgtttctgattctgagatcagttaaagcatttgactagcagtttgtaatctgagatttatgggactcatgcatgggcgtgtttatatttgtatgtgtatgttttaagccaatatatagttgtgcttttatatgtagttggtaaggtggattttttttcaccaaggaaattgttattaaaatgagtcagccacatttatagagagaataaagataagaatggtccgttgagtcattctaggctccccacatagtaagccatagtgcacctttgtgtcacaagcctttgtgtcgcaattacatttttaaatgtacaattaaattattattgactatagccatcctgttatgctatcaagaagggacatttttaggcctggcatggtggctcacgcctgtaatccagcattttgggaggctgaggcgggaagatcacttgagctcaggatttttgacaaaatcctatataaagtagccctacaggtagattgaattggtgaaaagttctttttcaggcaaggcacggtgactcacgcctgtaatcccaacactttgggagaccgaggcaggcagatagatcacttgaggtcagaagtttgagaccagcctgaccaaagtggtgaaaccctgtatctactaaaaaatatgaaaattagccggcgtggtggcatgcacctgtaatccgagctactcaggaggctgaggcaggagaatcccttgaacctgggatgctgaggttgcattgagccgagatctcaccactgtactccagcttgggcaacagagtgaaactctgtctcaaaaaaaagttctttttcagtaattatcaacctaaaataagtgcaattctgagacattttagatataaagaggtgtggcaaagagtagggttaatattatttttcaaaacacatacatgtttaagagataagaaaggactgatttcagttctaaaacactgagctatctggtgggtgtggacaaagccgctgaaactatccttaggcattccagagcttggggccgaaaccagctctgaggttgagccattgatagatgtttataaacatcttggccaagaggacacatcagcccaaggagtactagaggtgagatcatgtcattcattctctcctcccacagctggcctcctcagagggaaaccttagctagctgttaacctgatcattaacgtttgctatcacattgattgaaatgtatctttttttaaaggcacaaatatgccagctacctttggacatttggcagggggatacgatggccaatattatggatatctttggagtgaagtattttccatggatatgttttacagctgttttaaaaaagaagggataatgaatccagaggtatagtattatttttctccttttattaattttgtagttgctccctcccctttaactcctagtgtaaaatattggtcacatctagattttactgtaagaggcttggtaacagcttttacctctgaggccctgcatctttcaaatcatcatacatcattaagttgcagtatacaagtgattaattctatagtttaaaaaaaactagtatattttcttgcttattaacattctgatatattacataattaaaaattcaaagctttgtttatggatttgagaatctgtagctgctagttttgacatgtaccatacaacattttagttttataggaggttgggaaagaaaggtaaactccttcctgatgtaaatggtttccctgtgttttgatattctctacacactttgtgcactttctgtgggagacgccctttttctgtggctggcatgccccacccactacatagtttgtgacctttgtcacaaagttgcttcgttaacctgagccattactttctgtatgcagtgaattgactgccaggtagctgccagacaaaccttcctgatttacagcccccaatctccattctcattgaagtctcatccatcagattatttccaaggctgatgcattttccaatgtatgtttttaaattcttcgattcagaaattagaagaacaaattatcaaaatcaggctctctgtactgatttcaaccaatagatttttttctccaaatgttttttctagattgcatagtaccttatacatatgtattgaaatacattgatgtgatttagatcaccattccctccccatcttcctcctgaaataacacctccaaggtacccatacttcattattttgaagcatttcatctcccatcccaccccacccaatctgttaagtccttgtaattctttttccattacctggccaacccatttacaaaggtcaactgctgactattgttctcacagacatacctattcctgcatgaccttcaaccaggacccatcccttaatgcctccaccatagagatagtgcccttaggattcaaagtgttctggggaagattgtatgactccactgacatgcccaactgcaaagtcatgcatgtagcctgaactggaccccagtgttctctgtggtccaactccattccccttattgatttccctccaagttcccaccacctctctcatctgtcagcagatgatctctcctctttattaagaaaattaagatcattgaagctggctgcagtggctcacacctgtaatcccagaactttgggaggctgaggtgggaggatcgctcaagtccaggaatttgaaaccaacctatttgatatagcaagacctcatctctacaaaaaataaacagaattagccaggtgtggtggtagaagcctatagccccagctactctggaagctgagatgggagagttgcttgagcctaggagaggtggaagctgcagtgagccgagatcatgctactacactccagcctgaatgacagagtgagattatctcaaaaaaaaaaaaatcattgagaatgagtaccttcatctttctttctgtgtacttcaatacttgtcttattttctcctgtctcagaggagatgtctctagctccaggagttcctggtaagagttcctggtttgctgtcttggaaaaaaaacttgctactgactctgataaccccaatcagtgctactactctgttcttttcacagcctaatttcttggtataagaagtctttgcaaacctctctttccttgcttttgccccaaccaacagaaatggaaagttacccttcctccgtagttaccactgatgacccagttaccaactccaaaggccctcgtccttcttctttacctcctgctgcttgttattcctctgtctgttcacagccctcagctgggcaatcaaacccttctttacttcccagtactccctgtgtgttagacaagtttatgtgttcccttaggtctctccaccttcacaaatttattcgttctatttcgttcacctaaaatatatgcctccttcatctgtgcatctcaaaaattccagcagtcttaattgaaggtctcactcacataactgcatgttcaagaagtctttgaaattatccaaaaccaaaagtgatctttacatcctttgaacatatgagtggacttggaggagtggaccaagccttccccgtcacctcctcagtgctgccactatgtgaccacatacccagtaccttctctcattaccttttctcttctcttttggagaactgtccccaaaacaaatagaaattaaaaatccaaagataaaaataaaaaatggaaaatagactagtttttaaagaaaaaagacaaaaaaaagtggtcttgagcatggaagaagggcttcaataagcttttactatgtctgcaatatttaatgtaactattaccaagtgaaaaaacatcatattataaaatattttataccatacaatacgaatgttgattttaaagtgtgttttaaaaaaaagtacatcaaaatgtcaatgattatctttggggataagtttatgagtgattattaattttttctgtatttttcctagagcttttccttatttttacatagtacatagattattttagaagccagaaacaatgtttcaaagagaaaaaagtctaactaggtaaaggtacaattatgacgtcttactggcaatcattggtgaggcttcctggcataagtgtacactgcctctcccagccaagcttcgccatcacctcctctgtgcttgcccttatgtgaccatatacccagaaccctctatcattaccttttctcttccagctgtcaaggtagcagccaaattactgatccctgtggttccaaggaacttgcaagtgtaatagaagcaattcctgcattgtcttctctatacttcctcttattctcaggcttcacagtttggcaggcagccatactactcttatttagacaaaggtgctgggttgaacttagagaaagcatcatcccaacaacttggagttaaaacttgtgatgttgaaaacaattttcagtgttactaaaattctggattcagcagtgctgttattattagatgtcttatgccataaggctggtgttaattccttcctttacactttttcctttcctttcaaatgctctgagtatcatggcacttcctgatcctctgctgtcacagcaataatggacctggctccaaaagccaagaagaatcccttggcccctcaccctcacaccctttgcagatactaaaagatgatttttaaacaaacattttgttccctcctacaatatactatttggggttttttgttggtggcggcgggggatgttcttcaaaaaaaaacccacaaatatttgctctaaaataacacttgccttacaaaatacaggtacccagttattaaaaattaatgctttgggacaacaatcctagtctccaaaaaacttagatcattattatagctatgtgtgatgaagagaaaaagaaattcttttgttgtcccaaagcattaatttttggtaactgggtacttgtattttctaatgtgagtgttactttagagcgaacatttattttaaaaagaaaagaggaagaagaactccccccacaaaaacaatgtataccacggaatacagtgcagccaagaaaaagaacaagatctgaacccagaaggcagaggttgcagtgagccaagattgcaccattgcactccagcctgggcaacaagagtgaaactcatctcaaaaaaaaaataaaaagaacaagatcatgtcctttgtagggacatggatggagctggaggccattacctttagcaaactaacacaggaatcaaaaaccaaataccacatgttctcacttaaaagtgggagctaaatgatgcgaacacatggacacgtagaggagaacagcacacactggggccttttggagaaggtgaaagatgggaggaaggagaggatcaggaaaagtaactaatcggtactagctttaatacctggataatgaaataatctgtatggcaaacccatgtgacacaagtttacctatgtaacaaacctgtactcgtaccccgaacgtaaaagttaaaaaaaaaaaaaagaaacagaaaaatacttcttcagaccagtacaccatacattacttattttgtgccacaaccacagagtgttattagccaacactgagaaagatggcattatcttgagttgttccaaactcggtgcatttgctttagtttcacatgtcagtgagtggtggcttcagatacatagacaggataaaaatatgaatttttatgatataaaggaatacttcatttgatctgaagtcatgggaagcagacaaatcaaaatatatcctgcagactttgttgtctcaccctccctaatgtgtgtgtgggtcattttgagaaggtagcgggatggcccttcaaagcgtcagtgccttctattgttagtccccaggcactagagaggctgggagctaagaaaccacatgttgttgatgttattggttatgcaatagagaagactgtgtccaggccttccttctctctgtaacctcctgccatcctacaaaccccagggtctgctctggggaccatttcagatcttggcaagcagaactatagaaagtagcagtagaatattttagggtatagttttcattctgttttgagggcctctatcaaagtataataactgactgcttacctataatagcctaaaactttgctacctctggttttatctgtagttttttaaatattgttcttcatagtaaatagacatcacatcgtaactgtttaattactttgttatatattacctaaagtacttttttctcagtgaacatgaagttgtctcattgtcagacatacttttcacttttctaactgttctgctaaataattatggaatggaactgcttgggattaatgcttttccaggaagctctcaaaggtctttaaggtcaccaaatgtgaattcagaatccagcagctaatcataggttgaaataatgggggcattttaaccaaggccatttctttttataaggcaacttcattgtgggaaaattttctaagaggtaatagacattgtgaattcaaaggcaattatattgttaagctactattatcttcctcctcttttgcatttgaagaaattgctaagctttgtttcttccatcagaggagaagaaatatgaacaagtatcacttctgaaagaaatactgagaaattcaagagagttaagtgtaactatatttcagtctgtaatgccataaggaaggagctacatcttacataaaataatagccacaaaaacatgaagagtcttggttaaacatgacaaagaatcacttgatagagaatctataatataaagctaaggatcccagtgcttgaaacagaatcttaggcccaattcttcctgtaatgtgttgctaaaagagaatatgaaatttcctctccagaaggtttttacaaatggctttaattctcttctctgtctcagctctcctgatgtaccacccaacagctgatttttcttataactgaaccttttctagtagcctcaggtttcgcctgacttgagggacaaaggaaggaattcgaattgatttccaacctacttcttgaatatttacaaggccaggccttctaaatcttgaatcccaaccagctggaagcagttcatcttcctttgggctcttacagcccttctttgtttgctcttagtaccccaataatctgcctggttagttgtctatttctttatcttccctgatagatcataagactcgtgtaaaaggaactattttattcagcgttgggttcccttctctgcttcacaactatttaatttaattaatgttttacatatttgtgcctctttggacctgacggttttctccatccgcttccacttctctacccccccatacatactcctacccagtgtgttttttcctttggatctcctccctccccagaaataaaggtttacccttctatcctcacaaatcagtaaggtttccagaagacctcttctaatcaggcaacaattcctactactattcttgtctccatctctcagtcagcaccagtttttttctctccctcctttgttgttgtcaaagcaattctatttttaatttttgtccattcaagatctccccaccctcacagaaaacaaagggtgtgctcttgggagggagttatggactatggaaggagaggtttcaaagtccagctttagagcaggctggtgagcttgtcaggtgcctgatcgtcatcccccgtccttggctggtcgctctctgccctgatgactgccgctcagtgtaggaaggagacagctctggctgccctccccagagtcatccatgctgggaaggatggaggaggggtggaaagttagtgagagcctgcatgtgctgctgcagagatgcccaagatagcaggagacccaatctgtttcccatttatatattctcattgctgatagatgatggacatccttcatttaggtaattattattgctattaaaatattacctgaaagggtgcatattattgagcaaaatgagtgcctaagtgccttatctctcccacttaatatttctactgaattatgtattctatttcttactaatagagaaaatgaagttccttatgcctttctttagctttattaggagatagaactaattttgaggaagtgctacaccaggaatgcatttgtttccctgaactgtatataagtaactgagctggggcagtgtgaaaggaaagagaggagaggggaggaggaaaggagatgggaggaggagaggtttgttgattaccactctatgccagatattatgctagagagcaaacagaatactgaaatcacctcctccaactgcccagaaactgagtgaggtaggcatattcccatttgacagatgaggaaatcaaggccccaggtcacatagctaaggattgagccaagattcaaacccgggcctgagtctagagttcctgatcttgcttcagaaattgtcactgttagagaagacttgcatagctgccaaaagatacatgctaatcttctaggattaaaaaagccacagaggtggatgacactggttttcctccataggaaagctctagtttttactgtatgcagatcttcctgaaggatgtttctaatatgaaaaattttagcagttgtcttagagcttcttttcttgatttcctcacagttagtttctttataaacaaagtattaatagaacaacttagggcaaagactccctccacctgtggcatatgtctcccagaccacgttctctcacacaaaagagcctggtaccccccgaaacacaaaaattcacttaactatttttttttccctaagaaaagcaagatcctgttaccaaaatgactcttaaactcttctcaaaacttcattgcaaaggaaatgaaactattaaaagaccattgctctgtaattcaggaaattgaatcaacttgtttggagccataggcagaggaagatttgagctgtactgagccacatattgtgagactaaacagtgccctgctctgaaatgattttaccattcatgagctgtctctttataacaccatggagctcctcaaatgcttccttttctttactacctaaaattacagttctctgcacaaaatgaaaatacttttatcagatgttcacatttggagtgattttttaaaactttcatttcaattttccttaatgtttctatacttgtcaaatgcgtatgtctttttaataaataaaagatacatgatacatacatcttgaggctgaagaatttctgcagacgaaatattgatgattgagactggatgataggtttgtgagagctcattatactgttgtctctactattagtatgtattttaagtttttcataataaaatgtttaaaatatttttgtaattctgcagaaaaatttaactcacattgtctgcgttcttcctgtactgctctacccagagagcacagtctttccatgctcctcccactaatttaacactagtcaaattttggcattttgaccaaagaaaggaagggaagggaggtaaattgtggttgggctcaagagccatgatatgctccttcttagcttaattaaaatccatgacaagcacagccatcactcacattttagattctagattgctgctgtagtagtcatgaattgctgcagaacaggcaagaaatgacatgtttttttttgtttgtttgtttgttttcccgaaagctaattgaaggctgggcacagtagctcacacctgtaatcccagcactttgggaggccgaggcaggcagatcacttgaggccaagagttagagaccagcctggccaacatcgcaaaaccccatctttactaaaaacacaaaaaatgagccaggtgtggtggtgtgctcctgtaatctcacttacttggaggctgaggcataagaatcacttgacccctgggaggcagaggttgcagtaagcctaaactgtgccactgcactccaccctgggcgacagaatgagactctgtctcaaaaaaaaaaaaaaaagaaaagagagaaagaaaaggaaaggcagaggcagcggcaggggcaggaatggggggcggaaagggaagggagctaattgaatctagcttcaagccctcgtcgtcaggtttgggaagttcggtatcagtgactgagtgccttctcttaagaaaattgattgaaaacttgtaaataaggcaacaagactgctgtgtacctttttaatatcatactagaacactgtgtagcaaaccttcctaaagactattttatgctctgggccctagacctgtccagtatggtagccacgtgtagctgttgagcgcttgaaatgaggctaagtacaactgaagaactgaattgagatgtaccataagtataaaaaacacgttggattttgagcacttagaacaacagcaacaaaagtctccataatgtgtatattgacacgtgttgaaatgatactattgtagatatagtggtttaaaatagtaaaattaattttacctatttgtttctttaactttaaaaaaatgtggttagtagaaagtttaaagttacatatgtgcttcatattatgtttctgttggacagtgcagccctagagtttctgagaaggtaactttgactagttatttactcctgattagagtccagactgtgaagttacatgttggcctatagatgattaataagctgcaaatgatttctatttatagccaaaaggtaaccccaaaagtttgtgttcttatggccctaggacataaatcattttgtgtctgacttggtagatttcatccatgttttattttccttaaaagtttgactaaatttacctctgatggttgtaccaatcaaaatgttgttatacgacagagctggaaattctctagctcttcttgtactaagtccttttgatcaagtgatataatggatataaatttaagtgttactctgtgaattgtttattatctgtatatttggaattatgcttctgaattgtcttgccttgtttccttaaaaggacagtgaaagggaagtgaaaatattgaacaatgctgatactgaataacaactattttctttcactctatctgcacctgtgtttgtgtaaataaaagtagaggaactgtgacgttttaaaattccagacctccatccccaaagaaaactttccaaaggtcctcattcccagcatcggacccacaaaaatgtcttgccctcccctgcggggcacgtacagcccttcttctctcatccataaggaagagggttctgttgttgttgttttgaatgagcccatcataaaagcagcagaaaccatttgacagtagccatgctactgtttctgagtacccagaaggctatttgtagccttcgtgaacacttgctttctaagccttttgaaatcacgagagatagcatagcaaataggaacctgttgtatattccatttggctatattttgtttgtttgttcatgttgtcagctcactgcttagaatctaaggagacaagaccataataaaggacagtgtagaagacctgaagttttaagctccaaatctcttagctaccaaaataaataaatactacagagctgtttgtgagcaagagaaaacatctagacagagtaaggctaaagtcctttttccttcacccctaccctctcctcttttgcatctagagatttggaaaattgctagaaccatgaattattaggtatgatgttttattttattaggttggaatgaaatacagaaacctaatcctgaaacctgggggatctctggacggcatggacatgctccacaatttcttgaaacgtgagccaaaccaaaaagcgttcctaatgagtagaggcctgcatgctccgtgaactggggatctttggtagccgtccatgtctggaggacaagtcgacatcaccatgtgttactggcctggaaactgaagggagttttgcaagtgaaaatttagatttctattgacatccttttgttttctaattttaaaaattataaagatgtaaatggaattataaatactgtgacctaagaaaagacccactagaaagtaattgtactataaaatttcataaaactggatttgatttctttttatgaaagtttcatatgaatgtaacttgattttttactattataatctagataatatgatataagagggctaagaatttttaaattgaatcatatatatgatataatttgatccttcttgtatcttgaagttttgtacttgggatttctggactgataaatgaatcatcacattcttctggtaaatattttcttggagctctgtgtcaactttgatcctttgtctcccaggaaggtgtgacctctcctttgcctgcatacctcaaggccaggggaatatgcctcagtgatgcatttatctttgtatatcaggccgcatgattcccaactttctgccacacttaaattacgttcctccatttcagttttgtcttttctgtctaaagttcagtcaaagagtatcaaaaaattatgtttcagctagactggtgtaatgtataagtttttgtatcttgtattagaggatttcgtagcttttattagaggctcatttccacctcagcatacaagatcgttagtcttttggcatgtgtgccaattagaatactaaagcaagtccaagcacatttttctcttctcacgtttctaataagtgttagggactttgcctcttttacttaccacgtccccaaaagtgtcaggtagacatgtcacaaatggctctgtagagagccatgggaagagagaggaggtggatgtggaacataaagggttcagaaactccagaagaggagtgggttttggatagaagcatttgaggacagctgctccaaagccttatgtgtatgatgaaacttaaccacggggaagagactcttcagtagcctgttctgtctggtgatttttattttaagtgaacctttggatctatctttaactctctttattgtgagtctaaattccaattctgcagcagatcagtaaactcacagtatttttcctgtggaaatctattcaataaggaaaccaagacaggataataaaatttaaaaaaaaaacaactttgaattcccctgcctaggtcttccagttgttttccagcgcatacctcaggtatgactttgctagccggggacaaaattagcaccttccgattctctagtccaaatgaactttgtgctaaataaaaaattattatactacataataaagttacagatagcaggaaatgcaagagctaggagattcctagattatatctgccaagcaaataccttaaacatccacctgaaatcctactaccccctcttctgagataatttgcccagcccttctcttcccacacactcactcaatgtcacccccttctaatccccaaaactgtttttgtggtctttgtagcctatagtagttttctcacatctttccccctagacttttctgtttttcagtttcagacaaaaaaactcttcagctttttccagtgtgtctccttaacagtaactttaccacttgaaatcttatttcatagaaaaactaaattggtgtggaaaggctgcacacaataaagttatattattatccatgaaaatgaactcatatttctttcatactttaacgttaaaaccgaaatgcatgagagcaaaagcaccatggtgttctttctatttagggcctacctctaatatttaaaatctaccaaagagcagtcacaaaattaaaactcagcccgggcgcagtggctcatgcctgtaatcccagcactttgggaggccaaggcaggaggatcacctgaggtcagagttcaagaccagcatggtcaacatggtgaaaccctgtctctacaaaaatacaaaaagctgggcatgatgttgggttcctgtagtcccagctacttaggaggctgaggcaggagaatagcttgaacccgggaggtggaggttgcagtgagctgagatcatgccattgcactccagcctggacgacagagtgagattcagtctcaaaaaaaattaatactcaaagaattatctagcataatttaaaagaaaggactttttaaaaattctctagcataattcaaaagaaaggacttaacttttttttttttagtgtggtcatccgtctagttgttctttttttccagatcagagcagagaatatcactgacatgcttgaaatggtggataactatgtaaattgtaattggacaaatgtacactttagatttatggactgagccacatataataaggtctctcctggtaattgatccaggggatttaggcctctttcgggttttttgttttttttttaggcattgttatgttgtgaaggataaaatcttcaacatcttatgcaaatggatagtaggcatgatcctaaaggtttagttttacgatgctgcagagaagagaaatgtcttgacgttttgccacctgatgtagactttgtccccctctagtataaatgttgcatgttacctagataaacaactaaaaattgccttgagttatcacctgagctacttatgccaaggtcttgcctttctaaagctaataaggtgagaggtggatatctgtagctcttcggatgaaaaattgcattgtgggagataccaaaattgaggaaatagctcttcaaagaaaaattactgatatgatcattgtacttgtaaatgccttaagtagcaggcagtgactcaattttctactttaccattttacctttagcttttatgtatgaattataggtctgtggagattctgcctccccactaggccagtgtgtgtttaccatttattcattttctatcatacacaggtggattaaaatttacattaaaatttacattaaaataccatcatacttcaggcttctataacaaaatatcagactgggtggcttcaaaagcagacatttcttacagttctggaagctgggaagtcccacaatccacatgctggtaaatttggttcgtggtgaggcccctcttcctcttttactgaccacatccccaaaagtgtcaggtagacatgttacaaatagctctgtagagagccatgggaagagacaggaggcagatgtggaacataaagggtttagaaacttctgcaggcagcagtggcagggagcaagccctagagtgtctctttttacgagagcaggaatcccatcatgagagttccttcctcatgactttatctaaacccagtcacccccaacaaaggccccaccccctaaccccatcacattggctgttacggcttcaatgtaggggatggggcacaaacattcagtccataacgaatactgattcctcaaatagggtttaaacatagttaactgagcccccaaagaatgttaaaagagaaaatccattttatttgaatagatgcagtgaccacagcttcttccctcaaatcaacacattacagttagatgtctcccatctgaaattggatagcccactgaaattgaacatgccttctcttataaatgtgtggtgagaataaaagcaacaaagaaatgaatgtggtggctcacacctgtaatcctaacactttggaaggttgaggcaggaggatcctttgtgctcaagagtttgagaccagcctgagcaacacagtgagaccctgtctctacaaaaactaaaaaaattagctagggatggtggcacatgcctgtagtcccagctacttgggaggctgaggtgggaggattgcttgagcccaagaaggtcaaggctgccatgagccataatcacgccactgcactccagcctgggtgacagagaccctgtcttaaaataaaataaaaaaaaaaggaaaaggaaagacatacataccctcagttcttcgaaaaacagtcaacgtccaaaaagtttattttttgagtcacctttaatagagaaatttcccactggaaacagatccacctaagtgattatctagtatcagctgtatcaaggcaaaaggtaaaggttataagatgtaaatattagaccaaaatagccttttttaacaaacacaataatgctgtacgtctgtaacaaaacaaaatttgaaaaattgaggtaatgtacacagcgatgcacacacccccacaccacaccgtgattcctgagttttgatttggttgaattcaccttgtagttccctttcctgagaaaatacaggttcaacacatctagtccacgatgtacgtacaaggggaaggggtgaacaggaaatagactcccttattctgctcacatgagctggaacctgtactagctgcatatttcatagaccccagaggctcacctcaattgtactcctatgataaaatgtctctagcatttgtcatgagagaaactggctagaaatagtttgttcattgcgtccagcaagacacgcattgctgttgatatctttgtggctaagatggagaatgtgactggataatagttatccaggtggattactagctattgaaacagtctgagatagttgcatgatgattaacgttaaactgggagtaatttcaagtcatttggctaaaaatgaaaaaaaagtcccataaaaaggtatcaaatgtacagataatagggctggaattattaagtatgatgatgttattaacatctaaaattattttggccgggcaaggtgggtcacgcctgtaatctcagcactttgggatgccaagatgggtggatcacctgagttcaggagttcaagaccagcttggccaacatggcgaaacccgtctctactaaagaatacaaaaattagccaggtgttgtggcacatgcctgtactcccagctactcaggaggctgaggcagaagaatcatttgaaccccggaggtggaggttgcagtgagccgacattgtgccgcttcattccagcctgggcaacagagtgaaactcttgtctcaaaagtaaaaaaataataatgtttaaaaatatttcaatgtggagacaagctcaaaatgaaattagacacattccattacccaggtaaaagaaggggaagcctgacttgatagtagtattcaggaaaaaagagttggcagttttatttggccaaattccaatatcagctcatggtacagcacaccgggggagggggacgggaggcgagaactaaggctttttaagaatgtgttgatggaagtatgtgcctagatcaaaagaataatccccccggactccagtgtaagatcaattactgttggaatattgtgttcctttctagatatcacattttaagcagactttggccaagtagtacagtgtttgcaggagcagtaacaagatggtgataactttgaaaatacttctcaaaagaaaaataaaaaagaattagggaagttcagtctggagataattcagaaatacagatgataattgttttcaaattcttgaaggaaatgggagagagaataggctaattctgtattgcttcagaaaccaaatggaaacaattaaattccattagagaaacggttggaaaatatgaggaggatttagttcagtacgaggaagctgtttctaatactttttgttggttaaaaatacattccgctgctgtggaaagcctgtagctgccaggagtgttacagagggcattcctcccttgagttgacatttgtgccaaaccggcttttagggcttctccagcttttaagatgcgataatgataagatgatcatcgggaaaacatccctcagatgaaacgttcacaggctggctctgaaaactggcattcagatgattgcggctcccccatactgtaggaatattgtttatggcttaaggttgcctcgctcctcatctgtaatcagtgaaagtttatccagaggttaattaccggttttctggtgggtatctgggaactgaggatgggagattaactgttgtatatgaccatagtaaagcaaaagactgttagagaatgagtaaacgttcgttttcctccctacagaatttacagttactctctgtccattccactcactactgtcttcatcacacacacagaggcaaacgtctgattcagatagccaggtgtgccatgcatgcactccaccatattgtgatctcttcgaggcttgtttctgtcccctgtcctccacagtcctggattgttaatgaatagttcatacatgtttgttaaataaatataccttctttaaaattatcttttgttataaagatgcctttttctatggtaactgcaaaatacctaatttgtaactaaacctaaaactatgtggataagttatttctacacctgcggggggcagatttctacatgagagtcctttcttagtgtactgagagtttctgcatgaggtaaatgaaagaaacatgttttttgtaaaaaaaaaaaaaaagaaaagaaaaaaattggcaatggagaacgtttctaaagcttctcagcttctccctatgattatgtattgaaacctcggaatttgttcatctggttttcttggggggtctatgaaaagggcagagcaagcagatgtcccatgattgccctgaaattatattagatatgttcgtgtgcatggatacctgcatttttctagggatagagtccttagctttaatcagaagaaattaagaactactgtctttaaaaatgtgctttcaaacatttgttttttgaattcatttcaaagactctaacgtgcccattatgtgtcaggcgctgtgcttggcaatgaggatacaaaaagacaccccagaactggagctgctcacagtggagtggagaaggcaaatgagttcataatttattgggataaattataatagaaaggcatgtatccaaaacttttctgtgttttcccctcaaccctggttgactccactatacaatttgactgtggtgccacaaaattttacatagttaccacgccacctgccaccgcaggcttctatttttaacaaaataattgcttttctcttttcagcatttcaggagtgggaccaaatggtgttctatatctggtatatccaggagtttcttagatctggtagttaaagggcttataaaaaagagatgaaaatgttcactttgccacttttgtgcaagtggttataaattgacagccattagaagaatgatgtgggaccccttttaagctgatatgtattagatagccaagaggcattggtacatcctataagtctagaaaacaggttgttaaaataatcactgagttgtttagagatggtccagattagtcaagatttcttacttcctgttcccagcaactttttttttgagatgagatcttcccatgttgcccgggctggtctggaattattgggctcaagagattctcccacctcagcctcccaaagtgctgggattactggtgtgagccactgtgcgcggccccatcagtgttaataatttccattaccaccagtaagagccaaaaaaagcaccctagcatttcaacctcttactgcctatttgtgacttctttatgtagggatagaaactgactaaacagatcaatggaagactaaagaagcctcagggctccaaggttcagacaaagactggggctggactttaaacttacactccattcccttctgtttctttaaataatcatctgcttctcagaaatccttgttttagtctatcagacctatatattttattttcttgtcttttacttattcatgtaattatttaaatttttgatgagataatacatttgatgagagaaagtggtaggagtgattccagacaggaattttctttctcttttaatgattggatggataggtcttaaaaggaatgtaagactttattccagaacaaagcagtcatcagtccctttgtattcagggcaaagtggggaaaaccaaaagatacattttgtcctccctgttccaaatcagatgcctttctatggtcttcaacatttgtgtgactgacaagtgggacttctgttgtaattcacaatgcaatcactgttctcaacatgcacatggcccactctgtctcagcttcaattataaaatcttcagccagaggctattatcctctgttttgttcagtcagcgagatagccagtgaatttccaactgagatcaggtggcaggagaaaaatttctcacacttcatctatcaagccgttatagaccccagtatatttcctccactggggggtcctgatagggaagtttttctgaagtcatttgggaaggtgtcctaacattgcatttccattcctaattccaccttaggtgagggcagggaaataatagcttaagaaaccgtaaattcacagagctccatcctcctgtttcattattttcatgtcactaatttttcagtagataagctacatcctgtggtctacccagccatgtgaagcatttctttctctcctgcccacccttcctttctccccaaagtccaattaaataaatgaaagattctgggcaaatctctccaaatcccagcaggaacacaacagaagtctgaggcaaaaaacatagttagtgaggccatggacaacaaatctaggtgctttttaatttgggagtgggggattggaggcttttctgtgaaacaccctagttttaaattacagtcagtgtcccagtgcctgccagctaaatgagaggtttggaaggattagggtaagagtagactatatataaccacttctacaagtaaatgccttttaatttttttctaacataaatattgcaggaagagtaaatgccttttttaaatgtctgtgcaagctaggcacggtggtgcattcctatagtcctagctcttcagaaggcttgaggcagggggatcgcttgatcccaggaatcagaggctgtaatgagctatgactgtgccactgcactccagcctgggtgacagagtgagacattgtctcttaaaaaaaaaaaaaaaaaaaggtggggccgcgcatggtggctcaggtctgtaatcccagcactttgggaggctgaggtgaggggatggcttgagcccaggagttcaagaacagcctgggcaacatagtgaggccccttctctgcaaaatttttttttaaattagcctgctgtggtggcacacacctgtggttccagctactcaggaggctaaggtgggaggatactttgagcctgggaagtccagactgcagtgagctgtgattgcaccactgcactccagcctgggtgacagagtgaagtcttgtctcaaaaaatgaatgaatgaatgaatgaatgaatgaatgaatgtctgcagaatccagaagagctctatggaagatttggcatctttgaaaactcattgaccaaattttaagtataattatgaacttgttccaggaaagccaaactactatctggttgacttttatcttctgaagttcaagttaatggggaggtgggggaaaagccagttaaagtcaacttgtcttataagggtggtgagtatttgtgttaaggcatacaaaaacctgattaattcctctgtctacctagtaagtttcttaataccctatcagaattcagctggagcactagtagagcaacacactgttttctcttgtgccagtagacaaaatgtcagaacgcctgctgcattcctctgggataatagaaatgaagtcattacgttagaaagtggatcatgtgcccaggatacacttctctcaccctgaacccagtgactctttcctgggttaaagttactgatctggtggcagatgcagttctggtagccagaagagggtgagacagaagagccacttaaggaacattgaggttttatgatatttgaaatggcaatgacagattggtgtggtggctgaagtacagatgtgcctatcagaaggtgaacaccaagagggaagtgttaggacagagagccaagaacttgattgctggcaagtgctggcttgaacaagggcaattgctggaatctaagaggggtgctaatattcaagagaagaaggtgtccagtttcagggctctccttgattagcaaacaattgttttgtaattcaaggtgactagaagttttacttttcaaaggtactgtaagagactgtctaacctcctccaaaggattttcaggacttgttaaccatgaataataaaaggtatgagttcatggccaggtgcggcagctcacacctgtaatcctagctctttgggaggctgaggcaggtggatcacttctgcccaggagttcgagaccagcctaggcaatatggtgaaaccttggctctactaaaaatacgagaattagccaagtgtggtggcacgtgcctgtagtcccagctacttgggaggctgaggtgggaggatcacctgggcttgggaggtcaaggctataataaggcaagattgtagcactgcactccagcctgggccatgacagtaagaccctgtctcaaaaaaaaaaaaaaaacaaaataaaataaaaggtatcagttcaaacaaaactccttaaaactactttattacctcttatgtataaaaacttttgtagtcatgttttaatggaatattaccaaagttgacctttattgtgcctgtcagaaaaatctggctgttatcttgggttcctaaaggaagaagtaataggagctgtttggcagacttgacaacagtttctaacatttctaaacagtctaatcaataatcaaaaggacaggcagggcttggcgactcacgcctgtaatcccagcacttttgtaggctgagatgggctgatcacttgagctcaggagtttgagaccagcctgggcaacatggtgaaacccctgtctctgcgtaatacacaaaaattagctgggcatggtggtgcatgcctgtagtcccagccacttgagcctgggagatagaggctgcagtgagcgatgatggcaccactgctgtccaggcttagcgagagagtgagaccctgtctcaaaaacaaaaagacaaaacaaaacaaaaaccacagaaggacaaattgtttggctcaaccctctagaaaccataacaatataaataactctccccagtgaattgtttctgtcttaaatcttggaaataatcatttttatcgtgatttttatcatttttatcttgaatatttgtttccacaaatctcaccctcttcctccatcctcttatacacattctcacaccacgttctttaagcaaagaaaatatactttcaagctaagtgtttcttttgatgctaagacacttaaaaaataacagtggggaaagcaaaagaaataaatgcttattcctttcccatctggattttacaaagcaaactggaggagaaaacaatacaagctcagtcagtatgcattttatttcctcctgccgctctctcactctgcttgggattaaatgttcccttagtcctcaaccaaaatggcaatatgatctcatgtttgtttattgtgttgtctttgtatttcctaggtcaacagggtgcaaattttgatttactgatgtagcttctctccccaaacacagagaaattcttcagggagcttgctgtaagcatatccaagtgcagctgaatctcacaggtagacattatataaaaatagagtaacactttaagatgcaaaagtggcatcattcagtagtgccatctctgcactccaggtgcaagtccaaggattctaccaaacagggttgccaaatactaattaaactaattggttatcaatgctgttcttaaatgttatgatcctggggtttctacaatgagaagaaaaggggatgctttccattccccatacaaaacgcataaattctattatgtactctcaaatcagcaagaaattaccaagaaaaaaattatcttgtctgaaataacaatttggagagaaaatgaccagtatctgtatatgtgtatttatttccttttatcttgtcatttctctatgtccaatacataataaactttaaaaaacaggctaacatatcaagatgaagagattcattatagccactatgattttctatgataaaagaaaaaaattttttcaatacactaaaatgggataagctcaacagactagagagtttcaaatgcataggaaaaggaaataaaaagagataaaagaaattataatacttctgaaaccagcaatgtgattctgcttcacactcatgcaactggcagcaatctagctactaaggctgaagatgagcacacccagtagttccactccaagatatggaccgccaaacaaacttctacatggacaccatgagatatctactacaatgttcacagtagctttgtttacaatggcaaagcattgaaaaccaccaaagcatctatcagcagaagagtggataatgtttatttgaacaatgggctgtattgtaattaggataagggaactaaagctccatgtatcaatgtagatacaactcaagagcagtgttacaatgccattgcagaagggttcgttcagattgccctttatttaagttaaaaatatatatgtaatatatatattcaaaataatgatgtatctttggtggagctatacatactagtataaaaacatccacatgaaaatggataataaattcaaggcttcctctgatgagggagaaaggagaataggattcagaagagatatacaaggagctgaaactacaactacaataaatgtttttatttaaaaacccaatgcaaggccaggtgcggtggctcatgcctgtaatcccagcagttttgggaggccaaggcaggcagatcacttgaggtcaggagttctagaccagactggccaacatggtgaaaccccatctctactaaaagtccaaaacttagccatgtgtggtagcgggtgcctgtaatcccagctactccagcacgagaatagctggaacctaggaggtggaggttgcagtgagtctaaattgcaccaccacactccagtctgggcaacaaagcaagactccatccaaaaaaaaaaaaaaaacaaaaaaccccaaatatgtcagtatgttaaagatttctttaagcttttgttttttattgtttgatctttttaccatttttaaaaatgcttctgagtgatttatcagaacgtgtctttcaaagcacatttttttaaaccagaaatccatctgacttctatcatgcaaaacccaggcatatgggattcccacatacagttgtttctaaagactaccccttggatgtcccccataaaacccaaaaatgagcatcctaatctactgaaaatctaaaataattgaagtcatcacacaagaagcatagaagttaggtggcctgcctcctgccattttgattattctgaaacaccttttcttgctctgggcattagtgctttgagcagagggagatccctgggcttagcctcaagagttgggttagactcctgactgctccttcccgggttgtagtgctcaatcagcattcattatcattccctttttcctccttcctaacagagccttaattttctttttttctcttttttctttttttttgagacagaatctcgctctgttacccaggctggagtgcagtggcatgatctcggctcactacaacctctgcctcccgggttcaagcctcagcctcccgagcagctgggactacaggtgggcaccaccatgcccggctaatttttgtattttttggtagagacagggtttcaccatgttggccaggctgatctcaaactcctgacctcaagtgatccactcacctcagcctcccaaaatgctggtattacaggcgtgaggcaccacgcctggccaagagcctttattttcattaagtatcccaagtcatctaaggataatttcatgcctcttgccaataattgattcaggaataggtatgtgaattaatcaagggcagtgataggtgaggagaagtttgctaaggactttaaaggaaagtttcctagttttcaagaaaaagctacagaaagaaacaatctcttcctctggcattattgtgtgcagatttgaggcccagaactagagaaacagagtcagcgcagctaggtatgtcagccctgaagaccacctctcacctctgaaggttcacacaagtgagccaatatctttctgcattatttaaaccagttaagatagatttttgttagctgtggccaaagacattctaactgatacatacatacatgattcagcttctgcagttgtcagcaggtatattaatttctgccttgctagttccttcagtggttttggaaagcaaaatgattcagtgcatgtgaatgtgctttgtaaactgtaaattgctattcaagggcaagctgttactattagtaataattttgctactaagtcttaggtcttagataccaattttgtttctttctttttcatttttatttttttaggacaggatgttgctctgttttttttttttttatttttatttttttgagacgaagcctcgctcttgtctcccatgctggagtgtgatggcacgatctcagctcactgcaacctccgcctcccgggttcaagcgattctcctgcctcagcgtcctgtgtaactgggattacaggcacctgccaccatgcgcggctaatttttgtgtttttagtagagacgggggtttcaccatgttggccaggctggtctcaaactccggacctcaggtgatccaccgcgcccggcctgttgcccaggctggagtacagtgacatagtaacagctgacctgttactcaggagcctcgaactcctgagctcaagcaatcctcctgcctcggccttacaaagtgctgggattacaggcatgagccattgtgcctgccagatacaaattttaattcactatataaattgtatgtcttagaatgtatttaactcatttattttaaattgatacttccagtgaccttatgagcacttacatatcatcattttacatcatataaagcagttatatatttatagtatctgttgaggatattttcagcaattagtttttatataaaggccctaaggccttttgaatagccattatgttaaagggttaaaaaatgtccacaaaatagggtcttcttacctaaaaactgatctttagcatatcctctgtgtcagtatctacatttgtaaggagggttttcataaaaattaagggagacagtacatgtgaggtactcacagcaggacctgaaacatagttaccagcagaataataacagttcgacctaacactatgttccagggatgttctaagaacttcacattaatcgactggtactgcagaactgtattcttgttctattgcatttttaaatttttaaaatagctttattgcttaaggaaaaatgtcacatttttattatttagacaagattgggcgtgctgaaggtattatggctgtagacacatttttattatttaaaaaattcaaatacagaaaagtatgaagatgaaatgaaagtcacctcaaattccatcttgttacttgtaggctggataagcaaccaggcctttgtgtttactaaggcaggtacacatatgtatacacacatatacacacaagtatatatatgcacttatagtgtatatgtgtgtgtatatatatacatacttatgcatacataagttatttccatatgtactatatacatgtctatttttagttggacaaaaggaaaaactggcattattttttaaattatagttgattccacatcctagggtatgaaagaagccagatttttcatattgtttgggatattgcttgtaagtgggtagggtctagttaggcagcagatacttaaatacatatttacttaaataaggtcatactgtctttttaaatgctcttaatttttttaaaatttaaagtagccctttagtcacataacacatcgctatgattttttacatcataattacttacttctacccaatttctcttgtttatttattattctccctaacagctgccttttttcttttataaaaaaaaaatttttttttttttgagacagggtctcactccatccccaggctaaaatgcaatggtgtgatcgtggctcactacaatctcaaactcctgggctcaagtgatcctcacagcctcctgagtagctgggattatatgcatacaccaccatacctggctaattttttcttattttgtacagacaggttctcccatggaatcaacctaaatgcccatcaacagtaaactggataaagaaaatgtggtacatatacaccatgaaatactatgcagccataaaaagggcacaatcatgtcctttgcagcaacatggatggagctggaggacattatcctaagtgaagcaacacaagaacagaaaaccaaatactgcatgttctcacttacaactgggagctagacaatgagaatatatggatactaggaggggaacaacacacactggggcctacttgaggatggaggctggcaggagggagaggatcagaaaaaatacctatcaatactacgcatattacccagatgacaaaccccatgacactcagtttaccgatataacaaacctacacatatacccttgaacctaaaataaaagtaaaaaagggccaggcatggtggctcatgcctgtaatcccagcagtttgggaggccgaggctggcagatcacctgagatcaggagttcgagaccagcctggccaacatggtgaaaccctgtctctactaaaaataaaaaaatacaaaaattagccagatgtagtggcaggcccctttaatcccagctactcaggagctgaggccagagaatcccttgaacctgggaggcagcggttgcagtgagccgagatcatgccattgcactccagtctggggacagagtgagacttcatctcaaaaaaaaaaaggagagagagagattgagagagagtccctgcccaggctggtctcgaactcctaggcttaaaagatcctcctgccttggcctcccaaaatgctgggattataggcataagccacaacacccagcctctttttagaagtttctaattgtggtaaaaactcataacaaaatttaccatcttaatcattttttagtatgtagttcaatagtgctaagggtattcacatagttactcagcagattaatagaactttttcatctcgcaaaactgaaactgtatactgaccaaacaatccccttttcctcctccttccaggccctagtaaccatcattctacttcctgtttctgcgaatttgcagcagtcgtatattttatgtcaatttatattctccagcacctagtatagtcatgctccataaatatttgttaagtgatgaatgaatctgtatttgagctatacacaaacaaatgaaacaagaagaaagtcacacagcctcatctgtactaaggaatcaatacccgctgtcttaggccattcttgccattgctataaagaaacacctgaggctgagattttttttaacacttcagcaatttgtctaaggtctcagcatttgcaaagtggcaaagttataattcaaactcaggtgtgtctgattcccaagcttgtcttctttgtatgaggttatgctgcctaccctaagctctgccgtccctcgtttccataactggccccactgagttcttcaccataggactcagtctcactattttcagattattctcagatttatacatctctgggacaggcaatacatttttggctatgtctttctccaattttcgaagtacaaggcaaataaacacagtgtgtttcctaggacaagagtcattacctctcagaagcttggattccaaatctaaaatcatatacttaactgatactcaatgacaatgtgattgagagttctatttgtcaacttgtctaggctatatcgtacctagccattcaaccaaacactgtgtcacaaccaaagatggtgttgtgaaggtattttgcagatgtgataaatatctacagccagctaactttaaggaaaggggattatcctggataatctgggtaggataaatccagttcgttgaaagtctttaagagtagaattcaggtttccctaaggaaaaaagaaattgtgtctatggaccaaagtgtccgcctctgcctgagagtttctagcctgccgttcctgatggcctgccctgcacatatcagacttgcctaccttgcccccataatcacagaaaccaattcctcacaataaagctctttcctctctctctctctgtgtgtgtgtgtgtgtgtgtgtgtgtatgtttctgtgtgtgacacaaaaagcacccaggagtgctgaacaaacatgatttcttccaactattagtgtcctgatgataacccctggggctaattagtccccaagtattcacattgttaactggatagagtgtctgcagggacaaaccctagagccctggatgatagatatgttaccatctcttccctctccctgcctctgatggagtgggctttgtattgatctctacacccaacttatcccagacttaaccctggccctatctctccaacacttgcctcatatttcaccctttagcctgagtcctgagtgataagtaccatctgactttcctactactgtgcccagcctaatttaatggaaacccagtggttaccatttctggaattgaaatgtgtgtcctttagacgcttcaagcgtggctctgcctgtcccagctgcttaggcttctggagtcgtccttgggagccaggtccatcttactgtccaaccttgatgggcagctcttaagccatccccatctcaccaattccatgcagccaccaacagagcatcctgcttcctaatcattgcacaagccatgaaggatggctagaacgatctattccagctaaccatgagtaacccagccatggaacatacagccttttccaaaaacgagtagaacctagttttccaaagctgagcttgaaaatattcggcatgtgtttgtgtggtacattcccaactttgtgactgaagtttcagaaatcaaattcactttcacctagctgtgttgctatgttatctatagttcgtaatgattctgtctctgcaggcaattgcagtatatgctaaattctgtctactctttttttttttttttttttgagacggagtctcgctcagttccccaggctggagtgcagtggcgcgaactcggctcactgcaagctccaccttccgagttcacgctattctcccgcctcagcctcccgagtagctgggactacaggcgcccgccgccacgcccggccaggatggtctcgatctcctgatctcgtgatccgcccgcctcggcctcccaaagtgctgggattacaggcgtgagccaccgcgcccggccctgtctactcttaaatatccatgagaatgggagactgtggagcagatatagagtcttaaaaaaattattcattttagtcatgaattcaacttccttcaccacaaaaacttagatccaagttgtgaacaactaccaagaatgaccaatcagggattccttttatctcctcacttctcccctgatgaaagcatgtaaagcagtgattgaaagccaactacaaaaagggagacatcctcattattcctagacttaatggtggagatttctacagacaatggttgtattcttggccacatcatttaacatccttgaacttcatccaaaactggaaggaactggactttttttccaaggtcccttttgccactgaagtcccatgagccttgagaatcaaagtactgttgagatgtccattcacccaaggaaggaggagataagggcaggcaatcagaagtcctgtttgcatgaggttctcctaagctccataggcagtggcagtgggctaatcggtaaaaatatggccagtacaacgtgaaggcccactgcatataatggcaggaagaactcactcactttctctttccagaagattttttttttttttttggaaacaggtcttgctctgtggcacaggctggagtgcagtggtataactggctcactgcagcctccatctcccagtctcaagtgatcctcccacctcagcctcccaagtagttgggaccacaggcatgggccacaacaccacaacacccagtttttttttttttgtcttctaaattttgtacagacagcatctcatgcttcccagactgatgctgaactcttgagctgcggcaatcctcctatcttggcctctcaaagtggtaggattacaggcgtgagccaccatgcccagttgaaagtaagttgaactaagcagaattgggctttgaatagtgaaaaggaactggaacagtgtttgctgttgttttatttttctaatggtggtggaagggacgatgctacagggtagacttctaagttctggatgctgtcagagtcagacagagaatcaggcagctgctgagatgcctgggtcttatggagcccgggcagaagcccatcctgcccaggtctgttgtgacccggcactcttgtcagtatcacttcgtgctcaccccagccccactcaagcaccattggtccaccttagtttcacctcgtcactgcatcagcaaaagggattttgggactgagaataaagttctcccattaggagagatgaaagctgctccaactctgaggagagagtccccgaaaagaacagaaacttaccatcagattgaagagaaggggacgtgttccttttgcgaccatgagctgaggttgttgagcatgcctgagagagtggtgcagactagggtcacaggaatagtgacccccctctagcccagaacctgatgaagataaatctctccgtgtctataaggatctggcgcaatctggagaaataagggtcatatgtaaataaacctaattggattgaagggaactgagaggatagaagttaattcctgtaaatttggattgatgccactaatacctcccaatgtaggccagaccatgggcaagagaatatgaattgagatgaatctaagttttctgttttttaaaggctttagatagttttctgacaagttagatcttccttagtcataatagatataaggccaggcatggtggctcatgcctgtagtcctgttattggaaaggggttcttatccagaccccaagagagggttcttggatcttacacaagaaagaattaggggccagtccacagactaaaatgaaagcaagtttattaggaaagtaaaggaataaagaatggctactccatagacagagcagccctaagggctgctggttgcccatttttatggttattttttgatgatatgctaaacaaggggtggattattcatgcctccccttttagaccacataggtatcttcctgacgttgccatggcatttgcaaactgtcatgctgctggcaggagtgtagcagtgaggacaaccagaggccactctcatcgccatcttggttttggtgggttttggccagcttctttactgcaacttgttttatcagcaaggtctttatgacctgtattttgtgccaatctcctatctcatcctgtggcttagaatgccttaactgtctgaaaatgcagcccaataggtctcagcctcattttacccagcccctttccaagatggagttgctctggttcaaatgcctctgacaatcccagtgttttgggaggctgaagtgagaggattgcttgagcccaggagtttgagaccagcctgggcaagatagcaagaccctgtctctaaaaaaaaaaaaaaaaattagccgggcatggggagctatgatcctcccactgcacttcagcctgggtgatagattgtctcttaaaaaataaataaataaataaataaataaataaataaataaataaacgaatacatacctctatgtagagaacaattgttttttattttatttttatttttattgaaacagtgtctcactctctcacccaggctggattgcaatggcgcaatttcatctcactgcaatctccacctcctgggctcaagtgatcctccctgcctcccgagtagctgggactacaggaacatgccaccacaccgagctaactggctaatttttgtattttttagagacagggttttgccatgttgcccaggctggtcttgaactcccggattcaagtaatcctccttccttggcctcccaaagtgctgggattacagccactatgcccagcctaacagttgttttttaaattgagataagataatagcataacataaaatttgccacttaaagcacttttaaatatacagttctgtgacattaaacatattcacattgttgtgcaatcatcaccactatctatctccagaactcttcttgcaaaactgaaacttgtacccattacacaacaactcattttgccctcccacccagcctgtggcaaccacaattctactttctgtctctatgaatttgactaccctagatatgttatataagtggaatcatacagcatttgttctttgtgtctagcttaatttacttagcctcgagattcatctatgttatgttaagaattcccttccctttttaaggctgaataatattacacacacacacacacacacacacacacacacacacacactatattttctttctttttttttttttttgagacagagtttcattcctgttgcccaggctggagtgcagtggtgcaatcttggctcaccacaacctcccgcttctgggttcaagcagttctccagcctcagcctcccgagtagctgggattacaggcatgtgccaccacacctggctaattttgtgtttttagtagagacacagtttctccatgttgatcaggctggtgtcgaactcctgatctcaggtgatcctcctgcctcggcctcctaaaatgttgggattacgggcatgagccaccactcctggccgccatattttctttatccatccatcagtggacatttgaattgtttctagcttttgactactgtgaacaatgcagctacaaacattggtgtgtaaatctctaagaccttgttttcattcttttggatggaagaatggactacccaggagtggaagtcccaagatcagcagtttgcaagctgtagtatcaagagaactgataatatatttccacactgagtccaaaggcctgagaaccagaagaggcaatggtgtaagttctagtttaagttcaagtccaaaggcagggggaaactgacgtcccaggtcaaagatcagatcagatacagtgaatccttccctactcagccttttgttccattcagggccttcaatgggttggatgaggcctactcacattggggtgagcaatctactttactgagtctactgattcaaatgttaatctcatcctgaaacaccttcacagacacacccagaataatgttttatcgaatatttgggcacatggtggcccagtcaagttgtcacataaaattaaccatcacatatgcaaattctctgtttaatattttaaggaaccaccatattgttttttatagcagatgtaccattttactatccctccagcaatgcacaatagttccaatttcctcacatccttgccagctcttgttgttttctggttgttgttgttgtttttttaatagtagccatcctagtgcatatgaagtatacttcttccatcatgggtataatttttatttccctaatgattagtgacattgagcatctttttcatgtgcttcttggccatttatatatcttatttgaagaaatgactattcaaatcatcaatttttattattattatgttttaagttctagggcacatgtgcaccacgtgcaagtttcttacataggtatacatgtgccatgttggtttgctgcacccatcaactcatcatttacattaggtatttctcctaacgctatccctcccccaggcccccgccccacaaaagtcccagtgtgtgatgttcccctccctatgtccatgtgttctcattgttcaattcccacttatgagtgagaacatgcagtatttggttttctgtccttgtgatattttgctgagaatgatggtttccagcttcatccacgtccctgcaaaggatataaactcatccttttttgtagctgcatagtattccatggtgtatatgtgccacattttctttattgcgcctattattgatggacatttggggttggttccaagtctttgctattgtgaatagtgccgcaataaacatatgtgtgcatgtgtctttatagtagcatgatttataatcctttgggtatatacccagtaatgggatccctgggtcaaatggtatttctagttctggatccttgaggaatcaccacactgtcttccacaatggttgaattaatttacactcccaccaacagtgtaaaagtgttcctatttctccacatcctctccaacatctgtggtttcctgactttttaatgatcgccattctaactggtgtgagacggtatctcattgtggttttgatttgcatttctctgatgaccagtgatgatgaccattttttcatgtgtctgttggctgcataaatgtcttcttttgagaagtgtctgttcatatcctttgcccactttttgatgggtttgtttttttctggtaaatttgtttaagttcattgtagattctggatattagccctttgtcagacggagagattgcaaaaattttctcccattctgtaggttgctgttcactctgatggtagtttcttttgctgtgcagaagctctttagtttaattagatcccatttgtcaattttggcttttgttgccattgcttttggtgttttagtcattaagtccttgaccatgcctatgtcctgaatggtattgcctaggttttcttctagagtttttatggttttaggtcttatatttaagtctttaatccatcttgagttaatttttgtataaggtgtaaggaagggatccagtttcagctttctgcatatggccagccagttttcccaacaccatttattaaatagggaatcctttccccgttgcttgtttttgtcaggtttgtcaaagatcagatggttgtagatgtgtggtgttatttctgaggcctctgttctgttccactggtctatatatctgttttgatgccagtaccatgctgttttggttactgtagccttatagtatagtttgaagtcaggtagcgtgatgcctccagctttgttctttttgcttaggatcatcttggctacttgggctcttttttggttccatataaaatttaaagtagctttttccaattctgtgaagaaagtcagtggtagcttgatggggatggcattgaatctataaattactttgggcagtatggccattttcacaatattgattcttcctatccatgagcatgggatagtcttccatttgtttgtgtcctcttttatttcattgagaagtggtttgtagttctccctgaagagatcctttgcatcccttgtaagttggattcctaagtattttattctctttgtagtaattgtgaatgggaattcactcatgatttggctctctgtttgtctcttattggtgtataggaatgcttgtgatttttgcacattgattttgtatcctgagactttgctgaagttgcttatcagcttaaggagattttgggctgagacgatggggttttctaaatatacaatcatgtcatatgcaaatagagacaattttacttcctcttttcctaatcgaataccctttatttctttctcttgcctgattaccctggccagaacttccaatactatgttgaataggagtggtgagagagagcatccttgtcttgtgctggttttcaaagggaatgcttccagtttttgcccattcagtatgatattggctgtggatctgtcataaatagctcttattattttgagatacattccatcaatacctagtttattgagagtttttagcattaaaggctgttgaattttgtcaaagaccttttctgcatctattgagataatcatgtggtttttgtcattggttctgtttatgtgatagattacatttattgatttgcatgtgttgaaccagccttgcatcccagggatgaagccaacttgatcgtggtggataagctttttgatgtgctgctggatttggtttgccagtatttcactgaggattttcgtatcaatgttcatcagggatattggtctaaaattctcttttttgttgttgtgtctctgccaggctttggtatcaggatgatgctggcctcataaaatgagttagggaggattccctctttttctattgattggaatagtttcagaaggaatggtaccagctcctctttgtacctctggtagaatgtggctgtgaatccatctggtcctggacttttttttttggttggtaggctactaattattgcctcaatttcagaacctgttattggtctattcagagattcaacttcttcctggttcagtcttgggagggtgtatgtgtccaggaatttatccatttcttctagattttctagtttatttgcatagaggtgtttatggtattctctgatggtagtttgtatttctgtgggatcagtggtgatatcccctttatcattttttactgtgtctatttgattcttctctcttttcttctttattagtcttgctagtggtctatcaattttgttgatcttttcaaaaaaccagctcctggattcattgattttttgaagggtttttctttttttttttgtctctatctccttcagttctgctccttatcttagttatttcttgccttctgctagcttttgaatttgtttgctcttgcttctctagttcttttcattgtgatgttagggtgtcgattttagatctttcctgctttctcttgtgggcatttagtgctataaatttccctctacacactgctttaaatgtctcccagagattctggtatattgtgtctttgttctcattggtgtcaaagaacatctttgtttctgccttcatttcattatttacccagtagtcattcatgaactagttgtttgatttccatgtagttgtgcagttttgagtaagtttcttaatcctgagttctaatttgattgcactgtggtctgagagacagtttgttgtgatttctgttcttttacagttgctgaggagtgttttacttccaattatgtggccaattttagaataagtgtgatgtggtgctgagaagaatgtatattctgttgatttggggtggagagttctgtaaatatctattaggtccacttggtccagagctgagttcaagtcctggatatccttgttaattttctgtctcatttgtttgtctaatattgacagtggggtgttaaagtctcccattattattgtgtgggagtctaagtctctttgtaggtctttaagaacttgctttatgaatctgggtgctcctgtattgggtgcatatatatttaggatagttagctcttcttgttgcattgatccatttaccgttatgtaatggccttctttgtctcttttgatctttgttggtttaaagtctggtttatcagagaccaggattgcaactcctgggttttttgtttttgttttccatttgcttagtagatcttcctccatccctttattttgagcctatgtatgtctttgcatgtgagatgggtctcctgaatacagcacactgatgggtcttgactctttatccaatttgcccgtctgtatcttttaattggggcatttagctcatttaaatttaagattgatattgttatgtgtgaatttgatgctgtcattatgatgctagctggttattttgcccgttaattgatgcagtttcttcatagcattgatagtctttacaatttggcatgtttttgccgtggctggtactggttgttcctttccatgtttagtgcttccttcaggaaccgttgtaaggcaggcctggtggtgacaaaatctctcagcatttgcttgtctgtaaaggattttatttctccttcacttatgaagttttgtttggctggatatgaaattctgggttgaaaattcttttctttcagaatgttgaatattggccgccactcttttctggcttgtacgttttctgccgagagatccactattagtctgatgggcttccctttgtgggtaacccgacctgtctctctggctgcccttaacattttttctttcatttcgaccttggtgaatctgagaattatgtgtcttggggttgctcttctcaaggagtatccttgtggtgttctctgtatttcctgaatttgaatgttggcctgccttgctaggttggggaagttctcttggataatatccaagaagagtgttttctaacttgcttccattctccccgtcactttcaggtacaccaatcaaatgtacatttggtcttttcacatagtcccatattttttggaggctttgttcatttcttttcactcttttttctctaattttgtcttcctgctttttttcattaatttgatcttcaatcactcatattctttcttccgcttgatcaattcggctattgaagcttgtgcatgcttcatgaagttctcgtactgtggttttcagctccatcaggtcatttaagctcttctctacactggtgattctagttagccattcatctaactttttttcaaagtttttagcttccttgcgatgggttagaacatactcctttagctcggagaagtttgttattaccgaccttctgaagcctacttctgtcaactcatcaaagtcattctctgtccagtttcgtttgcttgctggaaagttgtgttcctttgaaggagaagaggcattctggtttttggaattttcagcctttctactctggtttctccccatctttgtggttttatctacctttggtctttgatgttggtgacctacggatggggttttggtgtggatgtcctttttgttaatgttgatgctattcctttctgtttgttagtgttccttctaacagacaggccccccgggtgcaggtctgttggagtttgctcgaggtccattacagaccctgtttgtctcggtatcaccagcagaggctgcagaacagcaaatattgctgcctgatccttcctctggaagcttcatcccagaggggcccctgcctgtatcaggtgtctgtcagaccctactgggaggtgtctcccagtcatgctatacaggggtcagggacccacttgacaaggcagtctgtctgttattggagctcgaatgtcatgctgggagaaccactgctctcttcagaattgtcaggcagggttgtttaagtctgcagaagctgtctgctgccttttgttcagatatgccctgcccccagaggtggaatctagagaggcagtgggccttgctgaactgtggtgggctccacccagttcaagcttccctgccactttgtttatactgtgagcatagaaccacctactcaagcctcagcaatggcggatctccccatccctaccaagctccagcatcccaggtcgatctcagactgctgcactagcagcgagcaaggctctgtgggcataggacccgccaagccaggcacaggagggaatctcctggactgccagttgcaaagaccatgggaaaagcacagtatttgggctggagtgtaccattcctccaggtacagtcactcatggtttcccttagctaggaaagggaaatcccctgaccccttgaacttcccgggtgaggtgatgccctgccctgcttcggctcaccctctgtgggctgcacccactgtccaaccagtcccaatgagatgaaccaggtacctcagctggaaatgcagaaatcacccgtcttctgcgccaatctcgctgggacctgtagaccggagttgttcctatttggccaccttgaaagtgaccctaaatcatcaattttttaattggattgcttggtttctttggtgtggttgagttataggagttctttctatattctagatgctaatctcttatcagataaatgatttgcaaatattttctcctaaaaacaattgttcaagttgacatgttgatatagtttgaatgtatattcccaccaaatttcatgctgaatgataacccccaatgttggaggtggggtctggtgggaggtgtttggatcatgggggcagatctctcatgaatggcttgggccatcctctttggtaataaatgatctcttggtctgagatctggttgtttaaaagtgtgtggcatggcccctactcttgtgcttactcttgttcccgccatgtcatgtgcctgctcgccctttgccttccaccatgattggaagcttcctaagacctcccaagaagcagatgctgatatgcttcctgtgcagcctgcagaattatgagccaattaaatatattttctctataaattatacagtctcaggtctttctctttctttcttttccttccttccttccttctctctctttcttctctgtctttctttctttctctttttctctcttctttctctttctctttcttttcttttctttccttttctttctttcgagacaagatctcactctgccacccaggctggcgtgcaatggcttgctcatagctcactgcagacttgatttcctaggctcaagcaatcctcttgcttcaccttcccaagtagctgagactatctgggtaggtgtgagctatgaggtgtgagccaccacgcccagataatttttaaactttttgtagagatgggtttttgctatgttgcccaggctgttctcaaatgcctggcctcaagcaatcctggccccgtaaagtcctacaattacagccgagatccgccatgctctatttctctattgcaatgcaagaagggcctaacatacatgtcttaattgttttttaagccagaagacatgtcatcaacaaaattcatatgttcaagccttaacgttcaatgtgactatatttagacatagagcctatgagaaggtgataaaggttaaatgacatcataagggttagaccctaatcctatagaactgatgcccttataagaagagacagagcagccgggcgcagtggctcatgcctgtaatcccagcactttgggaggccaaggtggggagatcacttgaggtcaggagtttgagaccagcctggccaacatggtgaacctccatctctattaaaaaaatgcaaaaactagctgggcgtggtggtgggcacctgtagttccagctactcgggagcctgaggcaggagaattgcttgaactgggagatggaggttgcagtgagccgagatcacgccactgcactccagcctgggcaacagagcaagaccctgtctaaaaaaaaaaaagaggcagagcctgggtacagcagctcacatctgtaatcccacactttgagaggctgaggtgagaggatcacttgaggccaggagttcaagaccagcctgagccacaaagtgagatcctgtctctataaaaaataaaacttagccaggtgtggtagtgtgtgcctgtagtggcagctactcaggaggctgaagctggaggctcatttgaacccaggagttggaggttgcagtgagctatgattgcaccactgtactccagcctgggcaacagagtgagaccctgtctcaaaaaaaaaaaaacaaaaaaaaaaccctaaaaaaaaaaaaagcagaacaggcagaggtacaaggctcttggtctgtctgtctgtctgtctgtctgtctctctctctctgtctttctcactctctgtctctaccatgtgaggacacagtgaaaaacaggccatctgcaagccaggaagaaggccctcaccaagaacaaaaccagctgatatcttgatcttggacttttcagcctccaggaatgggagaaataaatttttgttgcttaagccacccaatctgtggtattttgttatggcagcccaagctgactactatgacgtatattttatgattaaactagtgatacatgctgatgggacagtttcaacaaacataaaaggaataaagaagtaaaaatcatttgaaaccctgaaacccggagataatcatgttatgttatgcatccttccaggcttcttcctatgcatgtagaaaacttttcacaatccagatgctgttttgtaaccttttcttagcaataaacacaagtgtacatgatggttttgttttggtttgtttggtttttttgagacggagttttgctcttgttgcgcaggctagagtacaatggcgtgaccttggctcactgcaacctctgcctcccgggttcaagcaattatcctgcctcagcctcctgagtagctgggattacaggcatgcgccaccatggccggctaattttgtatttttagtagagatggggtttctccatgttggtcaggctggtcttgaactcctgacctcaggtgatctgcccacctcagcctctcaaagtgctgggattacaggcacgagccaccacgcccggccacgtggtcgttttaatgcactgcaaaatactccactgaacagatctaccataatgtatttaatcagtcccctagtgatagagatgtaggtgatttctaatttatcattattgtaaacaatgcttcatgaaggccttttatgtatatctttgcatgtttgtccaatttgttcagtgggatgaattcccagaaattaaatttctgggccaaaggatatgcttatttaaaatgttgacatcctgtatattgccaaattaccttccagaaaggctgaaccaatttatactcctactgtgcatgagagtgcccactgctccacacccttgccaaactggcatgctttcaacagcagtaaaaataggttcttgtctgcttttctcctatgagtcctaccaagtgcatgatgtgaaagtgaatgagaggaatataaagttgacagatgggaggtattttggtcactgtaatgttttatctaaagcacaccattttcctctcaaaacaagtgtgatagataagcccccttcattttttagtacaagttctaggacataatttcctaaatggattgattccttagagaatgaatgtctctgaggatgtggaaattattcaagccaaatgtgctttgggctgatagaggatatacaattttgacatagcagtatctatgtgacctcttttttaaagatgcaaagtataatatttttgccctgtgctatccaaagtgtcatactgcagcctactctgaatgtactcattcatttgcctgaagttcccacagagaaaagttttctctgactttgttttatattgaaaaagttttttaattgaagtataatttacacacaatatgaataatttttctctttaaaatctgattgtgaataactgcaaccttcatagataacctttcattacattaaatgagagagaaaagctcttttttttcctcgagacagagtctcactctgttgcccaggccggagtgcaatggtgcaatctcggctcactgcaacctttgtctcctgggttgaagccatcctcctgtctcagcctcccaagcagctgggattacaggggtacgccaccacactcaactaatttttgtatttttagtagtgacaggactttaccatgttggccaggctgatctcaaacccctgacctcagctgatgctcctgcctcagcctcccaaagggctggaattacaggtgtgagccttcgtgcccagcagaaaagcttataattaaacacacactctttgaaaagcacagagaaaagagaatggagttttacatgcagctatttcactccttagttgtatggtctgaagcacataatttagcacaatacgcttcttttactctcatctgataaactagcaaaatgaaatctacactaccttctccatagagatgttggaagcacatccaatatctctaggaaggtccttagcactatagtgagttaaattatatatatttttaaaaatgtgcatccagtcaaatatatctaatctacttgtatctgatcttaaagtttttgtgcttgaggggaatgtatttctttttcaaatgaaaacatgttgatcagataaatgtttacgatggaaaattatccttttgttttggcattaatgtcaattaaaagcattctgaaactgttcagcttcactgatgatattaatgaaccttacatgagaaaaagccagaaaataattagcataattataaaatgtgaactgtacattaataattctctttgttttttcccttttagccacttaataaattgtgtgtatcaaattattataaatgtggtacttctgatgttagcagaattatgttttaaaaggcataacaataatatttgtttaatttagaaaaaagaaagatcactttacatcctgttatcctagtgatactgtgaatacaattggttaatgcaaatataattcatactactgaattgtacacttaaaaatggtaagatgataaattttatcatctttataaattttcaaatttatattctaatatcgtctttctttttatttatttatttagagacagggcttgctctttcacccacctggccagagtgcagtggcactatcatagctcactgtagccttgacctcctgggctcaagccatccttctgcctcagcctccctagtagctaggactataggctctcagcaccacacccggctaattttgttttgttgctttggtagagatgagttctctccatgttgcccaggctggtctgagattcctggtctcaagccctcctgccttggcatcccaaagcactgggatcacaggcatgagagccttgccctaatgtgcctgcctgtctgcctgccttccttccttccttccttccttccttccttatttctttcttccttcctcttttttttttcttttttttttttttgagacagaatcttgctcagtcgcccaagctgcagtgcagtcgcacaatcttggctcactgcaacttctgcttcccgggttcaagcaattctggtgcctcagcctcccaagtagctgggattagaggcacgcaccaccatgcctggctaatttttgtattttcagtagagacagggtttcaccatgttggccaggctggtctcaaactcctaggctcgagcaatccacctgcctgagcctctcaaagtgctgggattacaggtacccagcttttctttcaacacactggttaggggtgaatgcttatcccctcagctctctgtctgctccccacgagtgacagcttgggatgcttgggcttcttcccttgtctcactctctcctcgggaaaaagcaccttctttggcaagattgagggaaagaattgctaaatgtgtgactcagcccctctttctctctgagtggccagaccttaaggacttgacttaccttgcaataagtttcctagagtaagccctgccctgcaaaaaggactgaagttagaagaggtttattttaattcagggaagtgagtatcagtaagcccatttggccacagactatgccacattctccaaccagctttattagctgtgaactaatgttttttaaaaaataatttttattgtggtttaaaaaaatagatgacataaaatttatcatcttaccatttttaagtgtacaattcagtagtattaattatatttgcattaaccaatctctaccagtctccagaactttttcctcttgcaaagctgaaactctatatccattaatcaacaattcatcattttcccctccttccagccgttggcaaccaccattctactttctgtgtctatgattttcactactctagatacctcataggagtggaaccatgcagtgtttgtcctttttgtgactggctcatttcacttagcatgatgtcttcaaggctcatccatgttgtagcatggtgtcagaacttccttcctttttaagactgacattttgagctcccagattccctgcttctatgtctccactgactcaaaactgagagctagagggagggtgtaactaattttcatcccctcaagccccatccaactggataatagtgtgttgtggtagacatctattgttttctctggccagggtcaaatagcaaatctggacagaggtaaagtgagactttactcaaaagggttattgcagtaagaggaagaggactattataatagagagaatgctctgatggtcaactgtaagatctgcaagcatctccaagaccaggcagaaaagggcttttcttttacagggaggaggaaagcaggctggaaggaagcaggtgaggtctaccaggatgagcaggttatcctgcggtgcgtcagggaacagttccccctgctgggtacgctagtctcagtaggggccattaaggagggcttgttcctagctctaatgtttaagggtgggccaagttcagggacttggaagaatgacagaggcctgactaaagtttagcccagttagcaggcattttgtccagattggcctgtggaaacaaacaggtcagctaatcatttatgagtcaaagaatgggaaattagaggatctctatatggctttgtcatagttagacaagggggtcactccaagtctctaagtcgtatggggaagggcaattatttgctgtaagtcatttcctggaacacaaaggttggagggaggctgggcgcagtggctcatgcctgtaatcccagcactttgggaggcagaggcaggcagatcatttgaggtcatgagtttgaaaccagatggccaacatggcaaaaccccgtctttactaaaaatacagaaattaaccggcgtgatggtgtgcacctgtagtcctagctacttgggagactgggggaggagaatcacttgaacccaggagacggaggttgcagtgagccaagatctcaccactgcactccagcctgggcaacagagcaagaccttgtctcaaaacaaaacaaaacaaaacaaaaaagttggagggagatggtttcctgatccttgctgttttccaggggcacagggcttgacgttgtcactaataccctttcctactccaggtgttgacagaacccctctttctcatggaaaatccacctcacttattttgagtgaggctgatcccactttctactcatacggatggacatgtggcccaggccttgccaattcaaatcacttattctctgattagtattattgctccagcaaatatgtagatgctccaagcagtaccgatcagtctctcctgagatttgatcatgtagatgctgggagagaaccctgatatgaacccagccatgcctagcttaggtctacctccagacttcccagttatgtgaacaaataaaacccctctttgcttaactgtgtgattcttttgttatcccccaccccacaaataactatgttgtgggcactgaggccttgttggcttggggtgtttgaaggatcctggctacctctgattctggaggatttcaagggtcttattttagttccaacagtgagactgttgactgcagagttgtggctctatttcaagcttgagtaatttcatctgccctccttgaaaaattttactgcaagatatttaatattctttcttccttcatagacttctaaacatcatggaatctccttgatcatgtttcactattcaaaggtaagtcctggctggatgcagtggctcatgcctgtaatcccaaaactttgggaggccaaagcaggtgaatcccttgagcccaggagtttgagaccagcccaggcaacatagggagagcctgtctctacaaaaagtttaaaaattagctgggtgtggtggcgtgtgtctatagtcccagctactcaggaggctgaggtgggatgattgcttgatcccaggagatggaggctgcagtgagccaagaggtctcacccctgctttggagggaaaaaatatagtatcccaacataaattttttaaaaaaatcctgtttttcctttaaaaaataagctgtaatgccctagatgttaaattgattttcaagttattattattatttttaatagaaatgggatctcatgctgtccccaagctagagtgcagtggtataatcatagctcactgcagcctcaaactcttgggctcaagagatcctcctccctcagtagctaggactacaggtgcatgccaccatgcccagctaagttttgttttgttttgtttttggtctggtagagataaggatctgaatatgttggtttaggaacacctggcctcaaacgatcctcctgcctcggcctcccaaagcactgagattacaggcatgagccaccacaccaggcctcgagttctttttgataaattatatgaacaatagattaacataaagaatggaaggaatcgtttttgcgagttttcagggatagtgcatgaaaaggcctcatagaagaaataaaatggggacactcatataaaccacaaagctttagtttacatttgacattttcccaacttcaacagatagatctacttaatgactagattgatctggtaaattagaaaagtcatgaaatggatcatgaaaatgatttaaaatgttttaattatggaagggaaaaaataagaaatagcagctaatcttcctaagtaaatgtgaaaaaaaaaaaaaaggtaatttaacaaatattcctggaatgccacttatgtgctagtcactggggatatagcaatgaacaacacagacaaaattttctgccgtcatgaatcttctagtaaaaaatgcaccaataaaataaaatgatgaatctccaagaataaacaacatttgtgttcccaaggcaagggagcctttcactgacttgacattttgctgctctctgtttgctggaaattgccctataccagcctgggcaacatgacaaaaccccatctctaccaaaaccacaaaaattagccaggcatggtggtgcatacctgtggtcccagctactcaggaggttgagatgggaggatcacttgagcccaagaggttgagatcgcagtgagctgagatcacgccactgcactccagcctgggtgacaaagcaagactctgaaaaaaaaaaaaaaaaaaagaaggaaggaaggaaggaaaaataaattgtactataccaaaatgttacagtgttcatctctgagtgatttttttatttctccttaatattcttctgcattttccaaattttctacaataagcttctattactttttaatcagagaagtaacttattagggggaaaaaaccctaataaactagaagttgaaatccttcagtgcagagggctgacctgaatacttgcctttggcaccttcctgaactgaaaaagtctaaaaagcaggacttgttgctttcactttgggtaactgtccccctccctcctctcattcttgagctttcctgatgtatcctaaagcaatttgttttatagtatcacatacctttttttttgttcacttttaaacattctgggtgcctagagccttgtctctttcttgcctctctctctcttcttcctgactacctggttcttctgaccttttctctacaaagatcaccactgttctacctctctgtggaccagataaaccctattactccacattgcccttgtcccttccaagtctaactaccacttttcaacaaactgaactctctctcggttactatggcatcccctgaaaaaatgtcagtcaaagctttctcctatacgcttacatttctaaaagttgtttaacaaatttacgaaagaatttttttagcccctgatgggccgaagcattatgttacagtctttgagaacttaaggtcataatagataattctttcattttgttttttataattggtttaatcagaattttattgttacaatcaatagttgctttacttttctctctctttagtttaaagaaatccctagcagtttccctatttttttttattggttcttagtatgaaagttgcattgacttttttttttttttttttttttttttgagatggaggtttgctcttgtcgcccaggctggagtgcaatggtgtgatctctgctcactgcaacctctgcctgccgggttcaagcgattctcctgcctcagcctcccaagtagctgggattacaggtgcctgccaccatgccaggttaattttttgtagttttaatagagacagggtttcaccatgttgaccacgctggtctcaaactcctgacctcaggtgatgcacctgcctcagcctcctaaaatgctgggattacaggtgtgagtcaccacacacagccacattgacttttatcaatgtaaagggagaagtcacttgatatttaggtaaattgtttaatagtattttatctacttttttcaaattggtaaggtgtatttttcatgccttaaaaatgtctttattgaagtataacatacagtaaaatacatttagtgtatttagtgagctttagtgtacaactcagtttttttttttaacataggtatattcccatttaaccaccaccagctcaagacacagaacactcccagcaaccccacaatttctcttatctcttcccagtcaatatcctcttgccccatactcctagcctactcttgccagaatagttaccactattctgacttctatcaccatttataagttttgcctatttttaaacttgaaataaacagaaccacccagtatttactcttttgttttggcttctgtaactcaacattattttcctgttcagttgcgtcatcatttttttcttttttattactgtatggtattccattaaataaatatacttcaatttatatatctattctcctgttgatggacatttaggggtttttcgattttttagtatgatgagaaaagttattacaaacattcttgtacatgtctgttggtggacatatgcactcatttctcttgggtatataccaaggggtggaattgctgggtcgtagagtagacatacttctacttttggtaaaattcttaacatatttgcatggcacaaaattcagcaggcacaaaagagtgtacagtgaaaagtctctctcttatctacatctcagttctacagttctcttctccagaggaaaccatattaccagtttcttacggaaacatactttgtatatagaagtatatgtatgtatagtcttgtgttttacaccaaagctactacacaatccaaactcctttacaccttacttctttcactaaacaatttatctttgggattagtctatattagtaacgttgaactgcttcattccattaaagcagcggccctcaaactttttggcacaaggcactggttttgtggaagacagtttttccacagaggtcaggggctggggagatggttttgggatgaaactgttccacctcagatcatcaggcattagattctcataaggaacacacaacctagattcctcacatgtgcagttcacaaacgggtccgtgctcctatgagaatttattactgcctctcatctgacagaattcggagctcaggccgtaatgctggctcacctgctactcacttcctgctgtgcagcctggttcctaacaggccatggacccgtaccagtccatggcccagaggttgggacccctgcactaaatgactgcatagtatgctaacttgcacatctaagaatatatctgtaggatgaaaacagctttgggcatttaaaattttgccttaattatataagaaagcctgttttcccccactttcaccaacacaatgagtttgtagacattttaattcttgctagtcttaggtggaaaatggtatctcattgtacccttaaatcttaaatctcccttaatataaggaaggtctttccatatgtaaagatttatttttatttcctgacctgtaagctgtttatattgtttgtgtatttttcttcgattattttttcttattttataataattatttatatattaagggaattagccctcggtctgtgatatgagttacacttttttaaatgaaaattattttattttaattttgagacaaggtctcactctattgcctaggctggagtccagtggcacaatcatggttcactgcagcctagacctcccaggctcaagagatcctcccacctcactcccacctcagcctcctgagtagctgggactacaggtgcacaccaccacacggggctaactttttttttttttttttttttagagatggagtcttgctatgttgcccaggctggtcttgaacttctgggctcaagcaatcctcccagctcagcctcccaaagtgctgggattacaggcatgagccaccacctctagcctgaaactcatataatacatagcaatttaagctcccacatatattaatttagaaaggattgcaacttaacaaacatttattgtgccaggcactgcgaaaagtgctgaatatataataaagattgatttgtacctttaaaacacttacaatctaagaacagaaagacactcccaaaccaaatgatcattactttatcatttggtaagttttattataggatagacgtgtacactacatgcacttcaagctcaacgtgtccaaaactgagtttgttgtcttcttctaggacctctttttccattgttccgtatcacagataatggcatcattagtcactcagctgctttgtttagaaaccttggagtgatccttgagtcctttctctccttcactctcaaaatggatttgccatttatctgaaagatcattgtgaaggactgtaggaaggaggaggctggtggctgagaaactattaattgcattagtccagatagcaatcgatgaggtagcaaccatgagaatggggaagaagacagaagagggacttgatgatttttaagtatagccagtgaggaagagttggggataagttccacatttctggctgagtggatgatggaagtcatgcatagagatggggatggagtgcgtaactgtttcaggaagggaaagatacaggattcagtttagacattttgtgtttgaggtctggtgtgacaaccaaatataattttaagtacagtactgccaactcccactttcctgaggtcataaaagggcatgttactatggttaattaaaaatcgatatggataattcttaaactgtccctctttattgctcacggctttcctgggtgttcacagtcttcctgggcgccctggtcactggccctgatccagccacaccttctcacaggtactcttatgaaaattaagccctgaaataggcagaatattgtctggtttgagtctcacaactttttctcctagatagaattaaggaggcaatgaacagccaaaacagaaacaggagggagttgtgagagagtagcaaaggggttgaataatttgaagcatagttaattggcctttgaataatcagattgctacaaaagtatcagcttatttacttttgaaatattatattacccccataccaggaaaataaaggaatgagggggaaattacctataatccagtcactcccataggaccactctaagcattatgtaatactatactcgctcccattttttcccagcctccttttcaaatggttataagtcacagtgtaatcattaattgtctaaaatgaatagtggtatcctggtggcataagataatttttataagtggccttagaggaacattgaatataaagtaaatgatcattgtaccctctttaccctgctataaatcattactctctttaaggacatagaaggaaatgtgggcttatgttccaggtacctaacatacaaacaggaagtcgtgcagacctgagacagtctggtatattagcactgaaatacagctaccttttaaattagtaagaacttttttttaacttatgtatgttttgtggcatggtagcatgaaaagatcactggtcttagaggtgggagactcaggctatagtcctagctttggcattaactgtgtggtcttgggtttagttttccttctgtactaaatcaattcagatctcccgcatacctgtcagtgagtgcgttaatgtgaccctgtttgtccgtgcctgatacatgcccacccctgaagctggaggtgagatcacccctctctacactaaaaagaccttgagtcgggaaagagtccagcccccagaattccatgggatgggttgttaccagaaggggaaatggatttgagcaggcaaaaacactagatgttatctaactttgttctccgtatctttatccccaaaatgaagggattggtgtaaaaagttctattaataagtctctctagatctgccttcacaggattgaaagtacagaattgtaccagttgaagtatgaaaaaaactatgctcttcatttgacttctaatttgtggtatctactctctatgacttcagggcaatttcatgagttcagaccaggagttttaaaccaggttcctgagtgactttcctgtttttgtgagctgtctgtgtatacttcctgcagagagaatgttttattaatagcaacatatgccctgaaacaacatacttctttgaccccaacaccgtttttatctttggaaaaccgatgatgtgttactaagtgttaagaatagtttattatttactgtgcagttgccaaaccgaatttatttttactcaaactggacagtacctggctaatacaatgactcccccaaattcaagtttttcgcggcatgtcgtcttattctacaagctgggagagtgtgtgagatcaaaggaatgtgcaaacaggccggagccatggctcacgccagtaatcccagcactttggaagcccgaggcaagcggatcacttgagctcaggcattcaagaccagcctgggcaacatggagaaacccggttgtattagggttctcttagagggacagaactaataggatatataaaatattatatatatatatcatatatacacatatatcatatatacatacatatatatcatatatatacacatatatatatcatatatatgagagtttattaagtattaacttacatgatcacaaggtcccacaataggctgtctgcaagctgaggagcaaggagagccagtccaagtcctaaaactgaaaaacttggagtacaatgtttgagggcaggatcagcatggcagaaagataaaggctcggaggctaggcccatctctttttcacatttttctacctgctttatattcactggcagctgattaggttgtgcccgccagattaagggtgggtctgcctttcccagcccactgactcaaatgttaatctcttctggcaacaccctcacagacaaatccaggatcaatactctgtatctttcaatccaatgaagttaacagtattaaccatcacactggtctttgcaaaaaggacaagaattagccaggcatggtggcacatgcctgtggtcccagctacttgggaggccgaggtgggaggatcacttgagcctgggggacagaggttgcagtgagccttgattgcactactgcactccagcctgggtgacagagtaagaccctgtcgaaaaaaaaaaaaaaaaaaggaatgtgcaaacatactttaagcataattttgccctgacaactcttttttccccaatctctacttgaacgattatttttaatgggactggctctgacaaaataatcctcacaggacctttaaattacataattaagcagaataaaacaatgtataataaaaagtttcctgttcttcaattctaatagcaaatttgcatatatattctctccattagcaaactgggataataatagtggctctctatctcagaaggttgttgaactgattaaaacgagataatgcatgtaaaatacgtggcacaatgtttgatgcaaacaaaatggccataaatattagctattactgttttaccatccataaaaagaatataatgcctacctcagagggtgattctgatgatcgaaagggatacaaagtgtttaacaggccagcacagtggcttcacgcctgtaatcccagcactttgggaggctgaggcgggcagatcacctgaggtcaggagttcgagaccagcatgaccaacatggagaaatcccatctctaataaaaacacaaaattagccaggtatggtggcgcgcctgtggtcccagctacttgggtggctgaaatgggagtatcgcttgagcctgggaggcagaggttgcagtgagtctagatctggccactgcactccagcctgggagaaagaacaaaaccctgtctcgaaattaattaatgtaattaaatgtttaacatatgtttaaaacacacatatataagcatataaagtgtttaatatttaaaaataatttctgctgctgctaatagaagaaatttgtggctgtttttaaggaataatagaatttccaaaatcagtgtctagcaacatttaccttactcatgaatttaaaaaaaccttctgattagaataccagtttcactgctgtttaatagtttaaccctattttgaatcagcaaattagtgttatggttaattttatataaaacataatgaaatgcatgtcccagctctgtcatcaagcagctattccatcttgggcacattcttaatgtttctaggccttccttaccttatcttttaaagggctattataatacttatcttgtgtacttcccatcataataataaaatattatgtgaggttgaaaatttccttatctttaaaagggctataataatacttatcttgtgtacttttcgtcataataataaaatattatgtgaggttgagttgattaaagaaccttgtaaagggtcaaaagaataacaatctggcagggagcggtggctcatgcctgtaatcccagcactttgggaggccgaggcaggcagatcacctgaggtcgggagtttgagaccagcctgaccaacatggagaaaccccatctctactaaacatgcaaaattagccgggtgtggtggtgcatgcctctaatctcagctactcaggaggctgaggcaggagaattgcttgaacctgggaggtggaggttgtggtgagccaaggttgggtcattgcactccagcctgggcaacaagagtgaaactccgtctcagaaaaaaaaaaaaagtaacaatctaacaataatttcttgacttgtcatgtaccaactaaatgccaagcctatgctaactgctatatttatattgtctcatttaattctcacaacagctccattaagtagttgctatttttatgtttattttacaaatgaggatcctaagtcttagagatgttacgtaacttgcttaaagtcacatttcatattaaatgtgcaaataaacatctattcaaactccagattactcttaacctttctactataaaaatgcaagttattattatttttgtataataagcagttttttttaatgacatcgtggtagggaagcccatagaggtgattattcaaatagtaattttttttttttatgagacagagtctcactctgtcacccaggctggagtgcagtggagcaatcttggctcactgcaacctccgccccatgggttcaagcaatcctcgtgcttcagcctcccaagtagctgggactgcaggcatgtgccaccacttccagctaatttttgtttttgtttttgttttgagatggagtcttgctctgttgccaggctggagtgcagtggtgcgatcccggcttactgcaacctctgcctcccgggttcaagcgattctcctgcctcagcctcctgagtagcagggactaaggtcgctagccaccccacccagctaattttttttgtattttagtagagaagggttttcaccatgttggccaggatggtctcgatctcctgacctggtgatctgcccgcctcagcctcccaaaatgctgggattatagacatgagccaccacacccagcctaattttcgtattttcaatagagacgaggatttccatgtctgtcaggctggtttcgaactcctgacctcaggtgatccacccacctctgcctcccgaagtgctgggattagtcatgagccacctcatccggctcaaatagtaatttactaacacattttactcacacatttctgacatttttaagggaacagtggtaaataaaaatgactactccttgaaatatgtgtttaattttctagggagaggtggatcttgttcctttttgaagtaggagccaggctagccagtgttcccttctcctctaggagccatacacttgatggacataaaacattgcagagaaaacagaagccctttcttctaaaaagattacaactcatatttgcttcaaataagacctgaaatagctgctcactcctaaaagagtatctgaactttatgggaaaagaagagcaccatcaagtaggcaaccattcctggggagaagttgatttggctatcaggttaaataaacatcttt

SEQ ID NO: 2 - DNA, 401995 bp, Homo sapiens
  source 1..401995: mol_type = other DNA
attataacagccaatgcagccgccatccacgcacaagcaaagaagcatgtcccatttaaatacacccacgcagccccagcgcccttagccgatcggggcgctcagcccacacgcaccgctgctcggggcttggagatccgcgcaggctgggctcccggacccggcggaccgacgcgcggaggatcgggatccggcgctgtggggctggggtgggcgggggaggctgggcccggggcctctggcgcgacacccgcatgaggacgcgagtgaaatagaccaaggtggaatttccaagggaaaagcttcggggtggttttggtccatttctccagcgaagaagtagacatggcgagcgactccccggctcgaagcctggatgaaatagatctctcggctctgagggtgagcaggacgttttctggtttctttccagtggtttgggttagggtgaatgggctcggtgcgtggactgggggctggggctggggcagggggacagcagcgggagaatgcgtcggggagggaacctggattcccgttttgattcggggttgctgaggtgctcctggctgagcccctacggcaggggctgtgcggtacgtgtcttcctctggccgtggcttaggctctcccgagggctcgtagagcttatgccagtttcatcttataccggtgtaagagcattaaaatgaaaggcgtgtgtgcgtgtgtgtgtgtgtgtgtgtgtgtgtgtacacgccccgggcagttgtctggtgccaaggcgcgagacccgactgtcccttctgcaaaaagaatgccagcgtgaataaaggcactggcccctcacgttttccagctacctgcaagatgacattgtgaggctggctgtccccgcgaagccgaacctgccgctccaagggggcagttattgctatgctggtcttgtagatggcaactgcctccccctcccccttttctacctcccgcgcccgggcgccctctcagcgctcccttaaatgccagtctgccactcacctttatttatggctttaactcagccctgcctgttctttctgactttgtggctgtaacgtttcagttttatggctgaacttaagcaggtgaaagggatgtgttttctgcttttcctcaatcagaccggaactccctggagtgtgtgcgagtgtgtgtgtgtgtgtgtctgtgtgtgttttccccgtgtctgtggccagtcctttgtagagcacctccctccccccagccccactggtttgcgtttaccttcacgtgaattacctcagacgccgtttcattgtattgactaagacatcactgatatagaatccattttgctgttgttttgagatcagaataccaggaatccaagtgctgcttcgacgcttccccacccccaactcccgatcccaacacactcctttggggaagggggcagagctttcttgccattttaattagatgctgcctgcctggaagggggtgaggggtggggatggtggcagcagcgggtgtctgagaaggattggacaccaatttaaggactgcttcttcctctcccgaaccaaaaataaaattaaaaagaaagcgagtgcatatacttgatgtatggagggtggatgagaaggaattcatggtggctctctacagggagacaccaggatggatgaagcatggaagttcacacgccctcctgaggaatacattgttagattgatgctgaatcttggggccatttacctggattcctagtacttctgacattgccgctatctgcactgatatattaaagtgctacctttgtgatcaaagtggtactttctctttggtctccttaattaaaccttttcctccacatctctttgaataagtctttctctcttcgtcttaatctgttgggctaagagatgaggtttcagcaaggcaagtaaggagttgagaagaaacagagatgccgtttgaaatgggctgttctgatagttgggcagccaaagctcattcatgcattattacaggaagctgtctatttccctggagtggaaatgccacatcaagaaccggctgccccctgcgcagcggggtggggttggtaacagggtgggtgcattggccaggtctgtggcttcctgctttaccgactgtgtgtgttcatttgccctactttctacgctgggagttgctgccggcgagttaatcaggtggatggatggccccgactgggggtggggtgctgcgaatcggtcggaggtcggggtggggggcgggaagtggcaaagggggaaggggtctgaacaatgcgcagggcttgcggtgatttccctgggccggaatctcgaccttgctcctctactggaaagcagtctgatgtgattttaagttgggccgggacttgtcccttatgggctttttcctcgggaaggttttctgagataccaagcacggagcctgcaggcaggggagcaaccggtgagggcccactgggcggacgactgcggttcacacttgggatgtgctttcttgtgatctgtattttgaaaatatatctttgcacaattcactgaaattgctctttgtggcctgggctatcagcttagggctctgcttctgtttttctgcctgctgggaggtgtggaaacagagagggcaacagctagcttggggaccaggaactgctggctagaagacttagatgcagatgtggagacagttatatcctggagggccagggtctttgaccagtcttgtgggtgaggtgtgtctgctggagtgggtccaaaggccacataggtaatctccacaaatcagagggcagatcatctccaccttgccacatttggagaggtggcctcatctagatgagatgtctcatttgttcctaagcccttggtaaagtctgcctgctgagcccctcctggggaatgcctgacccctgaaatgcagccaaggtcagtggcttctgggagaatttgctgcagacttaccagtccctcgctgtttcggtggctctttaatgtacacagtcaatgctctttttgtaaaccctgggctcaaagcattaaaagcagatcctgtctagagaggcctttatccttctcactttgggggcttattgttctcagccagtgattccagaccggacccagtctaaattttccccaaatagcaacaatgcataatttaaaccagagcaaccaatgacagcactgatcatttaaattatgcaagatttgcatggtttaaaagtgagtgaagcaggatcttctttggttagaaaataggtactttgaatccagttttagccctgatttttagagctcagagataaactaaatcttgagggatgggctggaattgttttatagattcagagctggaaagagaattgtagaacactcagccactcctttcattgaacacttgggaaactgaagcccagaggcgtgaagtaagttgttcaaggtcacacagtaacaaggggaggggacagcgaggagcgtggtttgaggaaataatctagatttcctgactcctcattcagtgctcttttctctaagtcacactttctgtggtggaatcagaaatcaataatacattttctgcctgagtacaaaagaatagcagaaaggaataatttcaccagggtcagggaattttatttattgagaatggcgaaactacttcatgcaagtaagcttgtgatacatgaaaccatggagctctaggccacctttggaattcatcttgtccagccctggttcaatgcctactctgcaggcaaacgactgtctgaaatcacctaggacacatggttgtcctgcacaggtaacctctctgagtaacctgtgtccatcagagcatgtctcaaggggtcagtataaacatacatgttattcagatggctctgcatgtgaggtttatagagttgtgtgtatgttttgtattatctatgtggatacatatattatgtgtagtattatggatataaaccgtatccacgtgggtgtatgaaaatgtgtgtatacatacataggctacagcaaacaatttactcattcaaacctggggcttgagtcattcttgcttcaagacatctcagtattaaaagagatgaaagttgccaccagtgtgctttattacatatgaggcgagctcagcccagaaagctttttggagattagcatatttctggacctaagcaccttggctgtccttaacttggcccacagggtaaggcattcaaggccaggagttggctgctgctgacctcatactctcagcttctgccaggactcacatacacttttgtatttgaacaaaattagatgatctacacttgtctttccccttagccctcattccctagccattcctttctccattgaaacccagatttaagaattgacctcatctgaaagccttgcatacatccctttgctacacttttcatgctcatgttttacttggtgtgtgatttcctttctgcttctttactaaaccgtggacttcttgagggcagaggctagatcttgttcatctttggagccatagtctccattagttggatgaatgagtacgtgaatgaatgcttgaatgaatggagtggaatgaaccctgtctccccagttctatgtccacctcttattcactctgtgactttgggtaggacatttaaccatagttaataagaatcatcacaactgtttgcctttctcacatactggtttcaaaatcaataaagtatttaaggcaatgctttaaaaaccatacagcactgtacaaatatgctatcccatggttaagtagaatttagtgggaaaattgataccatcaacatttgattgcaatgattttatctaatagaaaattatctttcctgggcacagtggctcacacctgtaatcccagcacttcgggaggccgaagtgggaggactgcttgaaaccaggagtttcagatcatcatgggcaatgtagggagactccatctctaaaaaaaaaaaaaaaaagtcagtgtggtggtgtgtgcctgtggtcccagctaattgggagactgaggtgggaagatagtttgagcctgagaagtcgaggctgtgattgtgtcacggcactccagcctcagtgacagagtgacatcttgtttaagaaaaaaaaaagaagactaagaaaagaaggaaaataatcttcagaaaaagatatcagaaggttccgactctttttaacagtacctccacagaccttagctgcctttttccttttgtgtaccaatgtgaccttgtatgtttctttgatggcctgaattgagctttgcgcccccagtattaagcattcattacatatgaggtaagtgcagccctgaagttttttggagattaacatatttctaaactagtatcaactatcagcattgttcattaaaaccttcttttttaaaaaaagttttctctctttatgtattaccgattattcaaatacaaacacattgatcatgactgtgccttcctaaagttttatcttttcccttgggagatagagtggacacataaaatgatacactaatggcccagtatttaaaactttctggtgagaggtctcatggggctcaaagaaatctcgaaacattattagttcattactccagagcacttaattaaatttggtctaaaatgagattttagtaaagttgcatgagttgataacagtatctcaaaatgataacagcatggcaattttttcattagatattctttttatttttcagagatactaaacaggtgttttctttacaatggcattgcctcataaaaagtagggtgtgctggtatttatcagaacatcagagaaatatgcataatcattttcattattcattattaactggagtaatctttagtacaaaagccagtgtaagtcatggtttgctgtttgcataattatctacttaggaggtcatgtaatattttgttgatgagagagtacccagtacatttctttcaggaaatattccttttttcccccttatctgtaaaactctttgatatcttataatttcgagtcttgcccgttcggcctttcttctttctgtgtctctgccctggaattaatcttccgtgcccttcttgtttcgacgccattccttctctcagtgatagtggttctaaagtccacccagccaggcgctcctgtgattgaatcatggccgccatgcccagctgagcacaaccagtctctgattcccttcctgatagaatctggagtaacttgagtctgaaagatgctttaatgtcaaattgattcttacatttctgtgggggaagtagctctctgagaacagggcctaaactggtttgttagcagtgtgctgagaattctaagaaaatcttaatgatattttttgaatgaaatgttattctgcacatataaatataaggtctctagtggagagagagggaggacttaagtagaaaatgttggatgaattccgcttgtgattccttccagtctggttggaagcttatttccctttagagaaacatgattctatccactcttttttacatgtcctggttgtctcatgggggtgccctcagtttctcaaaacacattttatatcaccccaacttaaaattcttcccttaatgtttatcatatgggtccccttgtctccactgttccctgcaagtgctgtagttactgtcccctgggcaacacccgcaacaggacctcccctcctcctgtgtctctaccaccagccttcttctgactggtttctcgtacactgtagccacgtgagtcttccaaacgcacagtttcaatctggttgtttttattcaaggccttctctgtctccttagtctacagactgaaaactaaactctttagcatgttaagaccagcggcaattcagaggggcctcccaccgagctctgcagttttgacgaccactcccccattgcggcagggaacaatttcattcccccatggatgctctgtagggggcgctctgtcttagtctcctttctgtacctactgccccaacgctgaacattcgcagaccaccttttccacagaagtctctgatttctctcaagttgtccctcccactcatagactgtctcagaactgacctcacacctctttcataacactcagaactttctgtcttggattatattcactactagacaattcctttttagaggcaacgtttgattttcttagggatcctcaccagttttctttacacagcaggcgttcgttcaacaaataaattttgaattaacaaaatatatactgtgcaacccttttagaagggctggaggtggtgctatgtagagagagtatagaaacctcagaaaggtggggcctgttgctgaccatggcacaatttcagggatcatgaattacattatagtctaggttgcatgactcctggggacactttttatgtagagtacaattccagtggatgctaattacatagagtacaattccgggggcaccaattacgagaaatactatgcctggtcctgggtaggtattcctatttctagaatttttctgccaaggaaagtgttctctccattgtcttattctaagttttgagagatttaaaataccatgggttagaattgcaaggcgtatgtgtgtgtgtgtgtgtgtgtgtgtgtgtgtgtgtgtgtgtgtttggagtgtgtttcaattatttcaacaatcggataatacttatgactgctgttttgattaaacagtaatagatgggcgggaaagggtgtgcttctggggtggcccactggaagacaacgttgagtttttatcttgacagagctggcagtgagcgggtagagagagtttgggagatggtgaggtttaatgaggcacacagctgggagttagagcccagcgtcataaagctggctctgacaccttgccctctaagcttcagttttgtcacatgtaagatgagtggtttggactagaaattgctggaggtgacttccagcaatttgtattgctgggatgcatattcctggaatatgtaagggaactagaggcaggactgagggcatttaaatagccatggattcttattctatctgttggagataccaagagattgcaaactgtgcacctcaatgagctgggaattgccactgaacgtaacatccctttctaatttttaaatgagctatttttttccagctgtcagattctgatttataatttaaagtgttgttctagtttttgaagaccgagtgataggacgaagggctgactgtgacttccgctgggtactcccttacagtgttgctgctggatacccggatttagactctgaagtaaccctagattttaaagtgctgtctctctagttagtgaaattagaaccttggcagtatgcatcaagtaggaaatttgtagactttaacaatacattgcatatgttacaaacatttgtttgattagtgtattagaaggtgcaagtttgggtgcagggtaaattcaggcccagtattctgtgattctgtgaaatgtgattaactgtaggggaagaaatgcacatggtatccagcattcattcatttatttgtttgtgtatatattcattcagtacctgattattgggtgctactagttgctggggctgagctgaagacaacattggcatggtttctacacccatggttggatggagaagagagcctgcacttgtcttttactacactctagccacactgatttttttctgttttgtgaatatgccaagctcattcttgtagttctccgtgtcagaaatttcacatggagggctccatcttattatttaggtctaaggtgagatgctgcctgtattattacttatgtatctgcatagcagactaccctcaagcttagtggcctaaacaacaataaccatttattatatctcacagtttctgtgggccaggaattcagaagtggcttacctgggtggttttagcatgaggtatctcctgaggttgcaggaagattttggcaaggtgagctatcttctgaaggcttgactggagctggaggatctctttccaagatgatttacttatgtggtgctggatgttggcaggaggcctcagttcctccccacgtaggtggctccattggttgcttgagcatcctcataacatcgtgcccacttttaccagatagaggaatcaagaaagcagagcagaagccactatgtcttttatgacctagccttggaaatcacacaccatcatttctgcaataccctgttggctacccaagtcagccctattcatttcgaaggggactacacaagaatattaactaacaccagaaggcagaagtcactgagggccctcttagaggctccctactaaacagagaggctttctttgcaatatatctgtaaagtaacactcccttccaccctgaaactgtccaattcagtgctttattatctttaaggcagtcgtgactatctgaattttttaaaaatctggctgtcccaactggagcctaataagttttgtgagaatagggatcttgcctgcatgttcagcaccacattcctggtgctttgaactgtgtctggcacatgataaatgttgattgaataaatatcaattgtgtgaatgcaattaattcattcatttaaaagggatcttatttatttattacacctcatacctccaaaaagtaagttgtggcaccttctgataaaaggcataaataggataaagccataaaaccatgttaaggctaaaatgaaaagtaaagggggattgtgtttgcatatctttgtctatatatctacttatctatctgtctgcctagggcttggtgattggtgatccaatttacctcttttgtaggtagaaatttggggtcagagaagttacttgtcttgtccaaggatgaaattcgaatgcagtgctgggtcccgttataccacgtccctcaactggattgccaacatcctggacatcttagtgaatcagtcattcccacaacacaaaaaccagtctaacaaagtatggatacaaagatggttataaagttgcttgtatgtacggaacacactgaagatagcctgtgctccactgtgaagaaaccaaatctaattagatggtagaggagaactcagctaagttaatcaatatagataagtagcaatgcttcagatgttgaaaataaaggttacgattctatgtgcaaagaggccacctgtagaagctggaaatatgtgctgtatcttaacctgagtgggaagctacgaagactcctggggctccagggcccaaaaaatgcagactgtgaaagaaagcagactaagcctgctgagttgttaaaaatttgtttaattttttttttatgtttgagacggagtctcacttcatcacccaggctggagtgcagtggcaccgtgttggctgactgcaacctccgtctcctgggttcaagcaattctcttgcctcagcctcccaagtagctgggattacaggtgcccaccactacacctggctaatttttatacttatagtagagacggggtttcaccatgttggccaggctggtctcgaacttgtgacctcaggtgatccaccctccttggcctcccaaaaattttgtttaatttttaaaaggcttttctggttctcattgtaaaagcaatggtcattgcaatggtttctgcatggtcagtgcagaaaatttggaaaatggagaaaaaataaaaagaattctcaaattatttaaacttatgattcctaatgataaccacatatgcactttggtgtatggcttagtagttttttcctatgcatggataaatagattttttttaaagtggagataatattgtacatattatatgtaacctattttttaaacctaataattagccttttctcatgctattaatctttttctatggcataacttttaaaactctttttcatggggaatttaaacttaaaaggtagacagattacaggaaacaacagatgctggggaggacatggagaaataggaacgcttttacactgttgggagtgtaaattagttcaaccattgtggaagacggtgtggcgattcctcaaagatctagaaccagaaataccatttgacccaacaatcccattactgggtatatacccaaaggattataattcattctactgtaaaggcacatgcacatgtatgtttattatggcactgttcacaatagcaaagacttggaaccaacccaaatgcccatcaatgatagactggataaagaaaatgtggcacatatacaccatggaatgctacacagccataaaaaaggatgagttcatgtcctttgcagggacatgggtgaagctggaaaccatcattctcagcaaactaacacaagaacagaaaaccaaacactgtatgttcttactcataagtgggagttgaacaatgagaacatatgtacacagggaggggaataacacacaccggggcttgtcagtaaatggggggctaggggagggatagcattaggagaaatacctaatgtatatgatgggttgatgggtgcagcaaaccaccatggcacatgtatacctatgtaacaaacctgcacgttctgtacatgtatcccggaactcaaagtataataataataagtagacagaatattggaatgctcctatattactgataggaatgtaaaatggtacagccattttggaaaacagtttgacagtttctcaaaatgctaaatacagagttaccatgtgacccaggaatttcactcctaagtatatgcccaagagaactaaggacgtattcatgcaaaaaaaaaaaaaaaaaagtgtacatgaatatttatagtaacctcaaataggagacaacccaagtgtccatcaaccaatgaatgaataaacaaaatgtagcatagtatatccttacaatggaatatttattctacaataaaaggaagtgctgatacacactgcaacatggatgaacattatgctatgtgaaaaaagccaaacacgagaagacacatggttgtatgattccatttatataaaatgtctggaataagcaaatccatagagatagaaggtagactaatgcttgctggcagggagtgactgctaacgtcccaaattagatagtgcagatgtttgtacaactctgtgaaacatactaaaagtcacttgtacacttcaaaagagtaagtcttatggaatgtgaattaaagctcaataaaactcttattaaaaagtagataaaagggttaataatctctctactgaacaattatcccccataatgaatcctgtttcatctgtactcctacccaccttctcccccatattattttaaagtagcatattatttcatttataaatatttcagtagtttgtgtacttaaaaaatacataaccataatagtattatcatgcctaaaaaatttaacgtgtaataaaatattcagtcagtgctcaactttctaatcatgtttttagactgcttagcattttgttgtggagatggatcataatatatttaaccagttcctgttgatgaagcttgaggttatttctaactttccaactgataaatagtgcttcaataaacatccttatatataagtctttgtgtgcatctctgtttccttaggataactccttagaaattgaatttagaatgaaagtgtatgaatgatctctaaggctctagatattgccagattggcttccaatttcttgtgctgtaggtgtgtagcatttataaatgaacacataagactctgaaaaatcaattagtttaccaaagatcgtagagctactaagtggctgagcttacgactgactggcccaaagccactgccaatagtgactcacatagccatcatttgatttatggaccttgtcatgacatcagaattatctgttgtattatcaccctgaggctcacagacttcccagaagcctttggtttagggcacaagttgtctttcatgagcatagtggtgttttaagagctatttccaaggtatttcttccttgtaactttgttttgtaagatgaccaatgtcagattataacgtgtttttttttttttcttgcctaaaaccttaaaaacctaatatggtagctatttggggattaacagtgacattcttgtggagtgtatctaggggatgtttgtttgtttatttatttatttatttgtttgtttgagatggagtctagctctgttacccaggctggagtgcagtggggcgatctctgctcactgcaacctctgcctcctgggttcaggcgattctcccgcctcagcctcctgagtagctgggattacaggcgctcgccaccacgcccaactaatttttgtatttttagtagagataaggtttaactgtgttggccaggctggtctcaaacccctgacctcaggtgatccgcccgcctcagcttcccaaagtgctgggattaccggcgtgagccactgagcttggcttgtttacatttaaactgtcattctttctggaaaattatccagcaagtgtgtttggaggatgtgtggaatcaggctcaaaggtttcagttttttaagaattggagacagctgactctgtgatgatcatagaagatagcaaggtgagctacggccatgatagaatagagactattctcaagccttaatctgccagacaattgctaaaatcaaaatcttaagttgtgctttcagtttttcacataggtagatattttaagattctaatggagaaaatagaagatagaacaggaaaccaccagagtaaaaagctccgtattctggactataatctactttcaacctggtttataagtaagaaactattaaaattgacacaactttatggtagttggtcttgcagagggcaattttcttgatttactacagtttataacctaatcctccatttaaaatgcctataaattatttatgtctagggtaaaaatccagggcttcacatgaatatggtttcatcatttctacctctaggtattttttttaaagctgcctgtaatcaaatgatagcagtgtggtgggtggaacaggttgtaagcagtaattgcaaactgtatttaaacaataataataatatttagcatttatagagcactttatatcttcaaagtacttgcaaacattatctaattaaataccctctctgattataatctggatacaaatgcacttaaactcaggacagggtcatgagaaaagtatgcatttgaaagttggtgctagctatgctttaaaaacctatacaatgatgggaaagttagagttcagattctgttggactgtttttgtgcatttcagttcagcctgatggcagaattagatcatatctgcactcgatgactctgcttgataacttatcactgaaatctgagtgttgatcatcacactgatccttacagttgctacaacacgaataacataaataagctttaaaatgaggtccctctctacatttcatgccctggcttcagatgaaactgccattagtaagtgaaatgaagtggcatagtgcaaggaagaatggctacgcattgtggtttagtaatgtccatctgagagtaatagatttaactgcaccgtaggatacatcataaagaaatgcactggagaaatgaaacatctttagtttgactgtattaactacttcttgctgttttggatatgtgtctgtgtattgtcccctcgcacgtataccctgtgttgccaatttagatggtgtttggagcaaggacctgtgcggcttactcagtaggtagtagagagttctgcagttggtagattctcagtaaatgttatcctgcatgttgtgattttctaaaagctagttgacagtttaactccctaagtcagcagttctcaaagtgggatccttggaccagcagcttcaggatcctctgttaggccctgcctctctcaactttttttttttttttttggagacagggtctcactctgtcacccaggctggagtccagtggtgcgatctcagctcactgcagcttcgacctccggttctcaggtgattctctcatctcagctcctggggtagcaagtactacaggcatgtgccaccatacctgactgatttttgtattttttatagagaagggctttcctacgtgatctcggattcctaagctcaagggatctgcctgcctcagcctctcaaagtgctaggattacaggcgtgagccaccatgcctgggctcgctcaactattgaatcagaaactcttaggatggggaccagcaacttttgcgttaagaagccctcctagtaattcagaagcatgtgggagtctgagaaccactggcctaaatgtttaaaagatagtttccttggctgggcatggtggctcatgcctgtaatcccagcactttgggaggccaaggtggaagcttcacttgagcccaggagtgtgaaatcagcctgggcaacatggcgagaccatatctcaataaaataaaataaaataaaaaagaaaagcaaaatatattcatggaaatttgggtatgcctgaaaatgttgcagaataggaaatagtaaattatttatggtaagtgcaactttttcataaggcatatgacctcagagaaattgtggacagtacacattcttaggagtatggaagttaaaatttttttactaatatttgcatttgaattgtttgtaagactcaaagatacttgaaattgaaaagtctacaactttcaattgataattctgtactttgcattgttctttgcattgacatgtctttttctttttttttttttttttagcaagtttattcaaggtgcagaaaagccccactcccttgatcaacaagatgcatccttctgatgtcgatttcctgtttttccctataggcctgtagggattgagtttgaagccccaggaggtgctgacatttgcttggaaactgaaagaaagaatccatattcacaaattctttcagccctacttctgttagaagcctaaaatcttcgagttatttattttttgagacctgggaaatggaatgtatatttggaatctagacagcaggttgaagatttccttactgggaaatcccacagactttctttgtaacaacaacttgtaagcatctcttacctagccacaaaagtgtcccatgttgctatttaatccacagttcttagataagcacattgcttatattgcatgtctgtttatatggaggaaaagttgatggcaagtatggttgttaaagcaactttatatacaactgatagtgagcgtgcatgaaaattttatactcattgctggggaaaatgcttttaaaaatgtaaatttgaagacctcccctcatagaagaactattttgaaggaaaaaccgatggttagacaatcatcatcagactagatataaaaaatacctggttaaagattattaggtttttcccagtattgacacttagagggatagctccagttttctcagaagaggtgttaatatcattaaagtatcagggaattgttcaagcattttatttttattttattttttgaggcagggtcttgctctgttgcccaggctggagtgcagtggctcaatcatggctcactgtagcctcaaacttctgggtacaagtgatcctcccacttcagcctcttgagctgggactacaggtgtgtgctaccacacccagctaattttttgaaattttttttttttgtagagatggggggtctccctatgttgcccagcgtggtctcaaactcttgggctcagcctcccaaaagtgctgggattacaggtaggagccagtgtgctgggccctgttcaagcctttaaatcgggaatactaactgctctagatgggacaatgaatgacatcatttgaaaacttccgtctggaactaagtttggagcagtttcctttctagtggtggtgaaatcatagactctgtctaagaaagctacaaatttgaaatggctttttcacagcctgtttatctgattcctccaacgcttgagataatatatgttgcaattggcgtggttgaaagggccctttgagtttgggagtgctgcgatttttcaattgagctccaagactttcagagcatggatactctgggtagcagtggaaccaggtggttctgttgctggtgtcttactctggaatggttgacagagtcaaaactaagcatttgctcttcctaaaaggcctctgcttcttctgtcttctttaaattggtagctccagcaccagttagagagtactcagttttctttccatgcaaacaaataaacaaataaagcgctgtagtgctttctagagccaatacccagatgctattcagggaaagaacattgcacagacactctgttgtctgaacaatatgtatattctctctgggagtattttaaagatgtaacttgtgctggtattgtagccatcatttcttgaatataaacagcttttattttgggagaagaacagatgtaaaagtgtgaaatatagaagtttacacattttgggggagggggaaagggaagaggaacagtatttctttaaaatcatggtaaaccaatcttagtttttcctttgttttctttgagtgactgaaaattagcatgggaaatctgctggaacctgaccagctgggtacctaaacctccatttcactgattgcaccagaaaaagtgccagtggataattattataggtcctcatcactggaaacaaaaagggtccttcttcaggaggaagcctctctatgaagagaggaaatcgtagacattcagtgaaatatgtatgatacttaaaataaatcttagagagatacagagatccgagccccagatacagggtttgctttctagattgaaagagtctgttgaaggggtttgaaggctgggtgtccctctgtgatctctgaaccaaagctcttgccagttcagtcccccaaccccctttaattagtgtgtatgtttgcaaagagtacctgggggtattcaaagcagcagggacattcctgtgactattaagttctctgtccctttgaggccaggtctgtttcttttcttttctggaagcaaggtctcttgtatctcatcacttgatacaatgcaagttgcatcagatttaaaaaaataatcccctgtccttctttcctgtttcctccgtgtggctgctgccttctataagttgctgctggtttgcaggattcacaatcaggattttgtccctgtggagattttgtttagtttgcaaggaacatttttatttgagttgcatggttccttaataactcccctttgacaaatattctggttaaaatttctatgatcattatatttacttggttgtttagtatcgcatttttatactgaattatttcaaccatgttttcaaatggacagctctcaaaattttttaagtacatttaagtgaaacttggaatgtgcataagttgtgagatcatgtgaactctgcacttcacagacttgataaagtcaaacctttatccaggggatgcttcctccacaatacatgtaaatctgaatttaaaaatatacctaagaatatgcagaaactggaactctcatacattgccggtgggtctatgaaataactcagccactttgaaaaacagtttggctatttctgaaaaagttaaacttactacacgacctagcaagtccacttctgcgtatgtacccaagagaaatgaaaacataggtccacacagaaacttgtacaggagtgttcatgaggagcatcattcacagtggcccaaaaatggaaaccacccaaatgtctatcaactgatggataggtaaacaaagtgtagtgttttcatacaatagaatactattaggcaataaaaatgaaggaagtactgaatcaggctgcagcatgcatgaacctcaaaatgttatgctaagtgaaagaagccagacacaatgattgcatattgtatgattctgtatatatgaaatgtctagaaaatgcaaatctacggaggtagaaagtagattactggttggctagggtggagaggaaaacagggagtgcctgtaaatgggccggagggatctttttgggtgatgaaaatgcttcaatattggatggtggtaacctgagtgaattttatggtatgtaagtacctcaataaaggtgttaaagtataatatgcctgagacactgcttcatagttgaccagctccacacaccgtgaaggcaaatttcctagtcaggtctctgtgatatttctaggaaggccatctcttcaacacctggagagatagatgggttctctgatcctatcttctgctttctacgtattttcgtgtcattctttattctgaagcgcttgtcatattttacaaacataacgataatcatttccttcaagataaggtagctcaaataacttattcctcctgtagagaaaggactttggggccaggactgggagagctattcctgtctaaaaccattccttactaactctttctgttttcttaatgttccatgcttttctcacctctatgctgttatgcacactgttcctgctgcctgaaactcttcccaagcccctatcataatgtgccatttgttcatttgttaacaaattatttggttgtctccctccacaccctcttcctgcagaagagactataagctccacaaaggcaagctatgttttgtgtatccttgtatccatttattaatgaaatgaatgcctgctcgtgacttacagcataggctaaactccttaacttagcaagaccttctatgatctaaccattccctatttttctacagtatcagtaactaccaccccattccacctccatacactttatttcctccactgttacccctagagctcagctcttttgttcccacaaagttggggaattccttttctcaaatgatcagagctccttttagcatgtcatcttcctggaatcacagataccaggtgtttttcaaattgtaatgggttgtggagtgagtttaatgggttgcaatcagattttgaaaaaaaattagaatagagtagaaaaatgttcctatgtttactgttactgttactcaccattactatgatggcgagggaaggaaaggggcagtaatcaaggaggaatgagttgctggaaactgcagtagccaccatggccttgagaataccctctaggaaatgtggagaaaggaagagggcttaagagtctgcagaactgggtggaggctcagctccagtaatcattgtggtcattcgcccagcctagcatggtcttggctatcataaaaacagagggagagaaaaatcatggacactgtcatattatgtacaggaaaactgtgcaggcttctaccatgtgccacagtgaggttgagtaatggggagagtatggcccttccctcggagcagctgggagacaagagtagaatgttcatgaaaccagtggaaactgagcacatgctgagcttctgagggctgtgtgtgctaggtgttgagtgagggccaggtgggtgggtggcacaggccagtggcacatgctggccttggttagggcaagactttcagcgaggaatttgtggtccaggatttggtcctaagctttgcagttccaagaactatactgaaatgtggctaggatagagtctcaggtcacaccaacatgtggatgtacctgacactgatctggagtgtaatttatataataataatagtaatacacatgcatttaggctagtcgattgaagcagtgggagatgagaaagaacaaaatttaataccaatatttatagctaatatactttgtgaccactggccacgtgtcaagcactgggttaattattttaataaaagtctagtcttattaatgcagccacatcttgtgatatatactattctaattttatagatgtggaaagtgaggcttaggttaagtgatttattgaaaatgatggagccagtttttgaacctagtttggtccaattttttttctttttctttttttttttttgagacagagtcttgctctgtcacccaggctggagtgcagtggcaccatctcagctcactgcaagctccgcctcccgggttcatgccattctcctgcctcagcctcccaagtagctgggactataggcatccaccaccatgcccagctaattttttgaatttttagtagagacagggtttcaccatgttagccaggatggtttcgatctcctgaccttgtgatccgcctgcctcggcctcccaaagtgctgggattacaggcgtgagccactgtgcctggctagtccgattttaaaacatgaaatgtaagcattgtgctattgctgcttcccattttctaaataaatagtgggaatgcttttctaatggtagaactactgtctgctctctggggaactgtacttctgattttggagggacataggactctgaaactttgattagaaatgtgcttgacagggttggaatgaggctggggttgaacctggagcgtggagtccaaattctgatcccaccacaagtggtggttggacagggctggaaacccacacactcttccttttgttaacctgatcgagccacaaaacccctgttactaagacactttcttatgaaaaacatatcagggaggtttggttcatcatctaggtcccctggttaatgttaatccttacttttgtttttctgccttgctctgttcacactttttatcacctgcatctctgttttgcttcagaatgatttgtccacaagccattggtgtatttaaattataagcttcttaagggcaggaacttaagacactttctcaagtgacttgtttacatttgcattctgcagtgtgcctaacacgtaattcaccaggacgtgtcttctgggagtcatcgtgtttggatcctgcatccccactataactgagtggacaggcgacttgctatgcagttgtgaaaatacaatttcatgtgtttttagcctttaagaggagggattgtgattctgggaaaccaaaccttaacaaagtgcaggacccctgggaaatggaaagacctgtgtcctaggcagctgtgggtcttaatgcttgcattgttagaaacctcctaggtgctatgcaaggggaagaaactgagagggccctgagatggtgaaatggcctctactcattgctcttctatctcccctttagactttaaagtggttcattaagacaacagactataaacctctttataagtacaggctcaataaatgagacacaggtgaatttttattggcgacaagtcactgtgcaggtgcagcagttatattcccatgtctgctctatgcactctaaaaagcactgtctgtggggcagcttccccagtggctaacaggaaagtatgggaaaagacattttgccgcctcatggcgtggatagctagctagctgattagctggttatcaactccccggatttcctcagcacctgtcattagtggcacattgtaggccctcagatttttgtttaagtcatctggagccatctaattctgcttttaagaagcatgtgagcaagaaagattctttctaacacagggcatcaaatgaagttcaaacatggccttggcatgggtgacagattataggtggatttcagttacctgataggagttgagaatgatggaatctacatggtggcagatttactctcacctccctgactgttggcagagaagggcctgcctctggctggtccaatctaatatggaaggagaggatgagctgttcttcagaggctacagggtttgaataaatgcagccataaatcccagaagcagttgcatgtattagcttagacataggtcttggaggcacagggtaaaagcctcccctgcctatgcttgcatttgtgtgtttcttcgtttcatttttagcttctaaatattgattagctttagtgagtgctcactggctcttgtggttatcctacagctatagggggataaggcccatgacagttaaatggcattcctggaacagagcaaagtggaaggggtggtcaggtctgcaaaatgcagttcagcagcaaatgctatcccgatgtctcccacgttctctactgtgtacctcctactaagcttgggtgcttttttcctttacaaatgcagactgttgcactttacagtaatcagctgatatgactgcaatgaactatgacttcactggatagaatctttgaaatcaaatgtattaaattgactcttcctttctcagataataatgagtagacattccagctataaagaaagaattaatagattccaagcttttataggctttgggggcagtaataaaaaaagagaggaactggcacagatgccgctgtgcttgatttcattctttttgaggggtgttaaggttcttgacagcctcgccaaatgatccaagggggcaaatgcactggctctgtgtgaggctggggatggggatgaaaggtagatacactgtctgtttgatgcagatttgtgctgcaatgttcaaatcttcaacctgttctcagtcttttgaaaatcaaggcatgtaaatgaatgatgatagcctctagtgtctggttaggattccccagatgacaccttggcagagcatttagccagaacgtttttggcacctcagagagtaacgtgtataaaaggtgaccatgaaataatttgggctcatttgtgagcttctggcttatctcatttgttttcaaagtcacaggaaggaaaatgacttacgattacatcaggggttggactctctggatttgaatcttggtgctatagcttactagctttgcagcttgtgacaagttatgtaaaatccctacacttttctacacctatgaaatggaggtaacaataacagtacacataggactattgctggaattaaaaagacatattttatgttaagtatttatgacagtgcctgccatgttgcaaatacacaataaatgttcaatacattcaacatcagcatcactcttgcaaacaatttgagagcctactctgaatctggtgcagtgcaagcaactgggtatatgtaggtttacaaggtattaggttctgcctccaagaagttcaaagtgtagtggtaaaaacagatgtaaaaatagataaagagtattgtcagagcaccagggtagatggctagctgtataggagtggggaagatggagggaagtggaccagatggagggaaggtcaggagtgggagtttcatggagctgaaataacttaaagcaattctcagtgattcccaatgctatgatgagaatgccattgatgtaaaatattgatatagattaagtctgcatgtgttgtgtcttagaagtaagctttgtgttccttccatgctttcctgccctactgcccccactccagaacaagccatatcacttcatgtctgagttgttctgtctgtctttcttgcctgtcaccctctgattcatttctccctcttcaatttttctggcttaggatctggaaactttttatatgtgaagtattatttattaataagcaataatgtgtgtttcttgctttgtatgaaaaaccctaaaaattgctaattaacagtatggaactgaaaacacagaaaatgctatgtaagcccccttatttctgtcttaggaagtctattaatacaacatattagtagaccaaaggacattaattatgggatcatttcaatggatgtcaaaaaggtatggggtacaacttagcagttatttttgattaaaaaacaaagcaaaaactatttttaatagactaggattaaggacattctttcttaacttgataatatgtctaaaaccaatagtcatccctgtacctatcctttaaacaccagagactctctgtggtgcacactgttggttccctacccggcagtcatccccatcctttttctttctcacagagctctggatgtgttttggtgtttacctttccacattctcagaggaagttgacctccacttccccagcatgggggaggtagaatagattaagccagtcattgggattccattctttttgttgatgattggcttaagcaagtcatgcaacacaacctgtccaataagaaggccagaggaagcctcactgggggttcctgggaaggctttcctttcttttacaagtaaatatgtaaaaagatatcttccctatcctggacttggatattatctaaagactgtgatacttaggtttgctccagccatctgacaaccatgaggggaaagccaggagaatcacagaataaacgtatcaggtccctacattattgagcatctgaattaatcaaccctggaactggcctgactccagtcttcatattatatagataatacaatttccacattgtttaagccactctcagttgtgtgtttttttttacttgcagttgcaaacatcctaattaatgcatgttctttttaaagtgagggatgatatcaaggtgtcaggaatcagataataaccaataataatatataatgtaatggaaatgttagccattgaataaaggcaagacataaaagaaacaagaattataagaggatgagggccaggcacagtggctcatgtctgtaattccagtgttttgggaggccaaggtgggaggatggcttgaggccaggagttcaagaccagcctgggcaacatagaaagaccctgtctctaaaaacaattttaaaaaattaaccagatatagtggtatgcacctgtagtcttagcttctcaggaggctgaggtaggaagattgcttgagcccaggagtttgaggctgcagtgagctatgctggtaccactgtattccagcctgggcaacagagcaagactttgtctcaaaaaaaataaataaataaataaataaataagtaaaaaagagttacaagatgacagggacaaccttgtcatcatttacagatgatacctcaaaaacttagagaatcaactaaagatatattagaacaataacaattcagcaatgtggctggatacaaaataaatatacccaaatcaatagtatttttgtgagccaagaaaaacaatcaattacaaaatatatttgaaaaaagatacccttggccaggcatggtggctcacacctgtaatcccagcactttgggaggccaaggcaggcagatcgcctgaggtcaggagttcgagaccagtctggccaatatggcaaaaccctgcctctactaaaaatacaaaataattagctgggcacctataatcccagctactagggaggctgaggtacaagaatcacttgaacccaggaggtggtggttgtagcgagctgagctcatgcttctgcactccagcctgggtgtcagagtgagactctgtctcaaaaaaaaaaaaaaaaaaaaaaaaaaggaaaaagaaaagaaaacagatattcttaataataataagtgtaaaatatctagaaattaatgtaataagaaatctgcaggacttatatgaagaaaaaattaaaacctaacaagggacatactaaaggcctgaattaatgcaaaaatatctcatgtttctgaataggaaaatttagtaatattattcccatattaatatggaatttcaataaaaatatcaagcaggaatttgttttaggatctgaaaaaattattttaaattttatttggaaatatcagataagaatagctttttaatctgctgttataatttgtgtttttgttgcacacgtgtatgtgcatgtgtgtgtatgtctgtgtgtgtgttctgtgtctgtgatgcaatatttgccgcataaaagttttaacagttatacacagtagattttgatttttattaatataagcactctgtttcaggtaatgacttttcctaagaattacatctggtttcataaggtgttttgtttgttttactttgtgtttgctcaattatgtatgattttccttttctttctataatttgtcttgatttgtttttgctgtatcacttgaaagcagcatatatagtaagatttactttttgaacccaatgtaagaggtttcttttaaaggaggaatttaaaccatttggttttacagccataaatgatgtgtttgatctcttctcattttatttattctactttctttagtgttttctttgtttttctatatagactgttttcaaaaatccaatttgaatatatacttaaacctgtagttctctaattatgcaaattaattaaaaaaggaatcctttaatgtccccattacataaaaaagagtcaagttaaattttatttctcctacactgacctcatccttccagtgtttgttaattcaatttgatgctatagattaaaaatacattatattatctgatatcaatttaatattatatgcttcttattttttgttttaaattaaaatgtgaagatattaagtacaactcattgtttttcaaggatgcttttagccttttgcattaaattggtcattacatgaaattaggcatttcctgctctattatattgagttctttattttgagtttttattcacttagctggaatgtatacttggaatagatttttatgagaatgttatacacgtgcagtgttttatgaggcttcacattgcttaaaatgtttcttttgccttttttaaatgaacaataatttgtcagggaatacaaggattttatcataaacttttgctaccaaacttagatggttcataggctaatggtgtttaatattgtgaaagagaggcttagggctaatttgatatctattactttgtagttaacctgattttccgtctggttagtgctatgagtttgggaaaataatggaaattacttttttaggcatagatatagggtttgttttcagttattttgcttagtactcactgtagttttgctcctgggagcaggtttttgtccacatgtgaatatttatctttactatttttatttttggttctgttccttactattgaatttcttcctacttagtttggatctctgtgctgtatgttccctctctatcaccttttccttatttatttttgtatccgtcttttgaaattgcatctggttgtgatcatgtttgtctttcacagcataggtattattttccacaagtcgattgtgttctgtattgcctccagctttcctcttgcatcttaggcttccttgtattctttcttttcatttgtgtcctcatttcaatcttttcttctcttttggctattgcctcttgtcttaaggaggccatcttctcttagagttcttttggtttggaaacactattaaaaatgcatactaaaatttttatatattacgttttgcatgttttcttctgagttgtcaagatacaatacaaaataaggaaaatcaatcatttcccagtgtcacacaggcttattgttgtgtttctgtgtatgcattctcaaaaagaggtaattaactagtcttgggatttgccaaaaggcaggatgtaagttgccagcctgggtggcagccttttggtgggtgacttgagcaaactctaatgttaatcttcatgtgtttgaattctgtgtagaatgtactaaatttctctgtgactcagttttcctatctgtaaaatgggaataatgattttaccaatttcatagggttgttgtgtggattaaacaaactgatatatgaaaaaaaagacgcaaaagcagtatcctcctaagtggagaagtaagttactgtactaatgcatgcataaaacaaaaatatggtcctaaaattatttttagattttaaaacttaatgtaggctcattaaaaaaattgaatattacaagaacagtaaatagagagtaaaaagaacatgtaaaatcttcactcagaggaattatcagaggaatccctgataatattttggcatatttctctccagtatttctgtttattagaaaattatattaaaaagaatgtacttgtatggaaccctggacattttggcaataaaactctaaagacgctaaatatataaaaatacgtcaagatctatcatagcagctaccactgtattctgtttgcaatagacatgaagaaaaagtttgttgatatgggggataaatggagcatattatactattccaagacctttttatgttaatcattattttcctttttatgtaggagacaacattttcattttgggctcttcttttgtaagaaagttcttacaaaagaagattctttgcttaattaatttaacctttctgaaatataggtttctaaagagccaaaacaagcaggacggacctatgaaataagtgcgtaattcattattactgggtttcttcaaagcataatgttaaatctggttcagcttggtgtggctctactttttatcttctgcaacatgcaaattgattaaaattaaggtctactcttctcttggcaggaatttttatttagctatcttctcctgtattcaccatgaaggtgtaatctgaaaactcaactatatttccaaagttgaaatgtaaaggaaatgtaaaagaagattctcatccaattaataagattaagctatttaatattaaatgatttattactaaataaaaacatttatttttgttattcatttaatattaaattaaatgattttaaacaagctcttgattaaaacaatattaatttcatttctttttttttttttttgtctgttttttgagacaaggtgtcactctgggccagggctgaatgcagtggcacaatcttagttcactgcaacctcaaattcctgggatcaagcaatcctcccacctcagccttctaagtagctgggactgcaagtccacaccaccactccgggctaattgttttattttttgagagacagaccctccctatgttgcccaggttggtctcaaactcctggcctcaaaggatcctcccacctcagcctcccaaactgttgggattacagggatgagccactatgacagggcttattttcttggttcacgttaaaaaacaaagtattttcattgtttagcgtaaaggcattttgtttttacttttgttttttaaaattaggtgtagaggtaaaattcacttgatgtatattgcgatgaaactacttgaaacagtattgcaaaactcaagtttcttgagggatagctatatgctaaataccgtatttggtgttttgcatattatttagttgacaagatcaaacaacgtaaggcggtatttcatgtcactagtttttaaactttagcgtgcatagccttacctggggagcttgtgaaattacagggaggtgggctctatctacctctagagattctgaatcagtaggtctgggatgggtccccaaaatttgcattttaacaaaatgatgctgctgctgctgctgctttcaggatcacatttttagaatcactgtgatgagccacacaggagtggtaaggacagcaaattgcagggtgttcgggggaggaatgctgcaaaccactcttggttagaatgtatgtgaaaggcttctggggcgaggtaggattccagcaagaccttgatgggcaattaacatagagtagagaagaggggatggaggagagaacaaccagagagggaattgtgtaagcagtgatatggaggtaagaatgtaaaatgcttgtttgagggatggcaagaccatctgaaaggaagaagtgattcttgctgtattagggaataagattgaacaggctaataggggctggatttttgaagatgtttaatatctggttgaagagttgtactgtactttgcctaggcaaggaactggaggtggggtaatctaagaatttcaaaggggaaaatgtacctagtagaaaacatatttaaaaggaaaatagaaatagccaaaatcaggccctagctagtattcttttgctctctctcccttcttctctcttaacttctgaaggttatgtggagccaataaatattatttattagatgagtgacatgggcacaatagtgttttagaaaattaagctggtggcattgtagaatgaattgtagagggcagagggagactctagtagatatcctaggcttgaagaggtgaaagttcttatttggggatcatgatacccttaaaataagtagggcagttaaaataacgcagcttgctttgtggagggatggttaagatggagtgtttggttttggcttggtgaacttcgtagggcaggatgacttctaactggaatgtgtagctcgtggttgtggatctaaagctggagcttgggagacaggtggaaactaaatataggaatacagtacttgatggaatgataaattcattcatttgttcaattaacaatgtctcagtcactgaactgggtgctagagaccctataaacagtcataaagactatgagtgtaaggtcttggcagtgtagcttcagggggacaagggacagaattcagaggatgctgtgtttgagagaagagaagaaaaaggaggagacaatgaaagagaaagaggaggctatggaaggaatgatcacagccatcacatgtaaatcaggatgttagatctcccaccatggagagaatttgaggaaggaggtaataatgggcagtgccaaatgctgcagcacagaattgcagctactggcctggatgactagagtatgctggttgccctgcgggagtgctctttggaagcagagttatctgtagtggaatggggtgggggtgggggcggagcccttgagaaagtgaagaccctggattcagagcaattgttcaagaaatttagtgtcgagcattaagagagattaggacagcagaaagctaacatgctttcttttcttaaagtgaggaagacctttggtcggttgaccacagggggcaggaagcagtggtgggggagagataaagctatgaccctgcagtcttgcttatctcaatacagagctgctccatttttctggtttctgggggcctagtccttgggagtaactttgactcctctctttctctgcactgatcattagatccatcagaaaacctttttggtattttatcttcttgaaaaatatagccataatccaactacttctcacatctatgcaactatcaactttctcctgaattattgaaagtctccgaactcatctcccttctccttccttgaccttgagtctgttctcatccagtgtctaaagtgatcctaataaagcttaagttggataatgccactgcacaaaatccaccagggtccccctctcttttattattcactagagtaagtattgaattccttgcagtaacctacaaggccctgccaaacctgacctgctcccccagcccccagcaccaaacacacaccctcctcattcctcaagctcaagccctccaggagactgcagcgtcctctcacgtaggagtgctcttctccaaatacctgcttggtctttctcctcttttgggtctttgttcacatgtcatcttttaagtgagacctcccaggacactcttttataagttgtaactccatggcgcttatcacctgacttaagtattttattcctgtccctgcccactaggctgtaaacttcacaagggtgagccatctttcccttgattttgttcgttgttatagtaccagtggctaaaacgccttttagaaaggtagcactaagtgaatttttaactaatgcgagagaaagcaggcatagccattgagggagacaaggcttagagggtaataataatagcacttttgttatgcaccctgctctgtggcaggtgctttaatatgttgttgtatttaaatcttataactgccttgcacggtgggcattatactccattttacagctgaggaaactgagcattgggcacatggttaataagcgtataagctagtagattacagaggcaatctaatatgcctaagaaaaggggatcaaaggcagaggatttaatcttagaagttaggaaggatttttctcaaataggaagaaaggaagagaagaaacataagagctgagatggaaaggagaatgtgcgaggaaatcttttttctgatgaccttgatttttcttagtaaagaaggaagccagcttttctgctgagatggagaggagctgactggggatttcaggagggcaggaaaggtatgaagtagacctatctgggcagtctgatgaagatatagattaacagtgggattcctgagatgtgtttacggcccagctagaataatacatcaactaacaaaaggatgttagcaatagatggtgtctttgtgatcaattaatccagctcccaaattttatgctttatcattctgtatccctttcgtctgtgatctaccaagaccctgggcacttccacttatcttggacgatcttacatctgttttccatttgctcattggtttgtttatgatcattttttagtggtatttgtccaggtaggcagccattcaacacctgaatctcgctcttcattgacctctccaactccagcgaccttaacctctcctttcctctgtcacctttgcctaaggctggacttcaggagactgtggccttaccgggaaagtaaagacgggttgacagtggcagagtgtggtgagaaggggctaaaggacaggtgcccaggagtggagaagccctggagactctggagaggatggggctccagttcaaaaaggagggaggttgaagcaaggtagacctgaataaaactcattcctgtttaaaataattttgtatacattccaagatgattttatatatatatatttattatactttaagttctagggtacatgtgcacaacgtgcaggtttgttacatatgtatacatgtgccatgttggtgtgctgcacccattaactcgtcatttacattaggtatatctcctaatgctatccctcccccctccccccaccccacaacaggccccagtgtgtgatgttccccttcctgtgtccgagtgttctcattgttcaattcccacctatgagtgagaacatgcggtgtttggttttttgtccttgcgatagtttgctgagaatgatggtgtccagcttcatccatgtccctgcaaaggacatgaactcatcattttttatggctgcattgtattccatggtgtatatgtgccacattttcttaatccagtctatcattgttggacatttgggttggttccaagtctttgctattgtgagtagtgctgcagtaaacatatgtgtgcatgtgtctttatagcagcatgatttatattcctttgggtatatacccagtaatgggatggctgggtcaaacggtatttctcattctaggtccctgagaaatcgccacactgacgtccacaatggttgaactagtttacagtcccaccaacagtgtaaaagtgttcctatttctccacatgctctccagcgctgtccaagattattttgatgtttaaaaagaatgcatttttacatgcatggtgctgtcatttcttcctttttttttttttttttgacagagtctcactctgtcacccaggctgtagtacagtggcgtgatctcccctcactgcaatttctacttcccgggttcaagggattctcctgcctcagtctcccgaatagctggaattacaggtgtctgccaccatgcctggctaacttttctgtatttttagtaggaacagggtttcaccatgttggccaggctggttttgaacccctgacctcaagtgatccaccctcctcagcctcccaaagtgctgggattacaggcgtgagccaccatgcccagctcttccctttttttggacaaatagaatccacattgttcatagtaaaatatttttaaaatgtggaggaaaaaattattgtggggatatttgcttcacagagttaaacgtaaatactctgcaggaatgggtaataaatatagcatggtaaataaatctgtagatagtctatctaattatgtatacttttctgtatatttagccataggggtgttaaaaagttggcatttgtgttgctgtgaactaatgttactatttataacattactaatgtttagctgagaagaattgttagtttgtacaccagtctttcagtatttggcagctggcttaaattgtggcttttgatatttggacatgtatattaaaaacaagtattaatttcatttctttgctccaaaacacgcaaattaatcatgcataaattgaatgggagtgcatataaatgcaacataccagtttatgcgaactcagaattttaatgtaaagagttcggttttaaatgatttgggtgattgtagtcattccctctatttagtaacatgtgcccagttttttttttttattatgctttaagttttagggtacatgtgcacaacgtgcaggtttgttacatatatatacatgtgccatgttggtgtgctgcacccattaacttgtcatttaacattaggtgtatctcctaatgctatccctcccccctccccccaccccacaacagtccccagtgtgtgatgttccccttcctgtgtccatgtgttctcattgttcaattcccacctatgagtgataacatgcggtgtttggttttttgtccttgcgatagtttgctgagaatgatggtttccagcttcatccatgttcctacaaaggacatgaactcatcattttttatggctgcattgtattccatggtgtatatgtgcaacattttctcaatccagtctatcactgttggacatttgggttcattccaagcctttgctattgtgaatagtgccgcaataaacatccgtgtgcatgtgtctttataacagcatgttttatactcctttgggtatatacccagtaatgggatggctgggtcaaatggtatttctagttctagatccctgaggaattgccacaccgacttccaccatggttgaactagtttatagtcccaccaacagtgtaaaagtgttcctatttctccacatcctctccagcacctgttgtttcctgactttttaatgatcgcctttctaactggtgtcagatggtatctcattttggttttgatttgcatttctctgatggcaagtgatgatgagcattttttcatgtgtcttttggctgcataaatgtcttcttttgagaagtttctgttcatatccttcacccacttgttgatggggttgtttgttttttcttgtaaatttgtttgagttcattatagattctggatattagccctttgtcagatgagtagattgcaaaaattttctcccattctataggttgcctgttcactctgatggtagtttcttttgctgtgcagaagctctttagtttaattagatcccatttgtcaattttggcttttgttgccattgctttgggtgttttagacatgaagtccttgtccatgcctatgtcctgaatggtattgcctaggttttattctagggtttttatggttttcggtctaacatttaagtctttaatccatcttgaattaatttttgtataaggtgtaaggaaggggtccagtttcagctttctacatatggttagccagttttcccagcgccatttattaaatagggaatcctttccccatttcttgtttttgtcaggtttgtcaaagatcagatagtcatagatatgtggcattatttctgagggctctgttctgttccattggtctgtatctctgtttcggtaccagtaccatgctgttttggttactgtagccttatagtatagtttgaagtcaggtagtgtgatgcctccagctttgttcttttggcttagggttgacttggcaatgcgggctcttttttggttccatgtgaactttaaagtagttttttccaattctgtgaagaaagtcattggtagcttgatggggatggcattgaatctataaattaccttgggcagtatggccattttcacgatattgattcttcctacccatgagcatgaaatgttcttccatttgtttgtatcctcttttatttcattgagcagtggtttgtagttctccttgaagaggtccttcacatcccttgtaagttggattcctaggtattttattctctttgaagcaattgtgaatgggagttcactcatgatttggctctctgtttgtccgttattggtgtataagaatgcttgtgattttgcacattgattttgtaccctgagactttgctgaagttgcttatcagcttaaggagattttggtgcccagatttatatagctatgcaataaatacctatgcacatgttgacacaatgtcacgtattgactcatttgcacattgtctaaaatacctgtaattttagccatggaaggtagttaaaaaaagggaaagttcaacctgggcttaaaatggcaattagaatcacatattttcactggagaagggatgcaacaggctgcatagttcagctttttcatttgtgcagatgaagatcccagggttctgaagatatccattgttcaaagccaccgggctaggaagtgttagagcactaatgagaactcactaatgagaactcctttgtatcaatgaagagaatgtttggttgattgaaaaatttgtttttaacacagttttattggactatgagctcttcaagggtcaaggctaacttagggtcccatggtattcatctttgtatctcagtgcatagcacagtttccagtacatagtaggtatttgctgaatgcatgatttccaaaagtaagtttattttttccattttgataatatttaaaaaatacattaacaaaacaaaaaaggcattttgagaaagtagagtttaaaaaataaaattaataaattgagttaaaactgaagctagtgaattggttttcttgaccatataaatattgtctttatgtttacagttggacttactaattcccagaaataaatggccatttgtaaacagtgtgtttggtttgaattcatatgtataaacatgtggtgtgtgtaagtatgtgtaagggagtttatattttatttatgtatgtcttttactactttattaatatatattatattttacttaacatttccagagagtgcattaaaattaatgtttcctgagacttaatctttcctgagaaaggatctatccaatggtttagtcaaactgactttacaggatgttctgtaattggtggacacattgctagttccttctgtattaatcatgttatttaattcagtgtcacaataatattatttgttgtctttatttacagacaaagcacagaaaagttaagtctcatttacacaactggtcgggcgtggtaggtcacacctgtaatctcagcaatttgggaggccaaggcgggcagatcacgaggccaggagtttgagaccagcctggccaacatggtgaaaccccgtctctactaaaaatacaaaaattatccaggcttgatgtcacgcacctgtagtcccagctactcgggaggctgaggcaggataattgcttgaacctaggaggcggaggttgcagtgagctgagattgcgccattgtagtccagcctgggtgacagagccagacttcatctcaaaaaaaaaaaaaaaaaaaaaaaaattacacaactaatcaggagcagagctaggtcttcttattcaatgtctctgctttttatccagcaaaccagcctggctccgaggttagcatcttcatatgttatcttatggttggagtacagctggaggtgagaatgaacaaatttcaggaatatatatttttaaatagctgagaactacagtgtacaaccacaggcacccacacccaaaagggctggtggtaccatgacttcagaaggaaagtatgtatccaagttggatcacagctcccttatacacaggcccatgaaggggctatggaaagaggggcgtgaattctagaggataagctggtagactctttcccaagaggactcatttcagatgggtgaatttatcacaatgggtcagttctgccagtcaggctcagggacctcactttgtattttctggggtatgtgcatgtgtgtgtgtgtctgcagggagtggaaggcagtttctacatcttgtttagaacattgtgccagtttattaaattacagtgagaactagaactatcaaaggcacttagtttatgtagaactaatatgcattttttggtctaggtgatagagagacttagtttactgtctaacctggtctttcatatcttagtgatggaagcagtacaaaagggtaggatttgtactgtagtcccccttatctgtgggttcattttccacagtttcagttactcacagtcaaccacgatctgaaaatattaaatggaaaattccataaataaacagttcataagttttaaattgtccatcgttctgagtagcatgatgaaatctcaagctgtcccactctgtctgcccaggacgtgaatcaggcccttgtctagtgtatccacacaatagatgctgccctccctttagtctacttagtagctctcttggttgtcagaccagattgactgttgcagtcttgcagtgcttgcgttcgagtaacccttattttatttaataatggccccaaagtgcaagagtagtgatgctggcagattgttataattgttctattttattattagttattgctactaatctcacattgtgcttaatttataagttaaactttaccataggtatgtagtataggaaaaaaattgtgtatatagggttcagtagtattcttggtttcaggcatccacatattctctacagataaaggaggagtcttgcactcatagctattctgtggtatagctgggaatagaactctcatgtcctcagcatttggcccagagttctttccactggttttggattggaactgggcctcagaagtgctggagaggtgggcctaccttgagtgtaaaaaaactcctttttactgcttgccttcatgtactgagcagttttattgtttattcacatggagagttggaatagtggtaacattaaagtaaacataaacttaaaaatcagtttaggactagatgcttgaatacaaactcctataggcagggaccaactctgtttcttctgcatatcccaaaaggctccagaggcccagggacagttgggcctgtcttaccaacacttaatgaaacatcggttgaaataaaaaccctcataagtcaggcatggctaagtcgatcagtcagcaaatattgactgtcagctccgggcatgaaatagtttgatcacttggacactggtatctcccttgactaaagatgctaaaaagccatcttggttttagtgacatgcctcttctcgagtcacaaacatgttcatagaacagcaagcttataggtaagtggcactgactctgttgttggatattgaaaaatgagtgcttccacttctgcagtagccactaaaaacttgtggtcaaattcagtgcctgagctttgaaatcaattcagttcaaaaaacagatgggctattcttctgatgaaatgctaataatattcaacaatgaccattagttattaagtgcttaggatacttgtcgggcactgtgcattacctcgtttcattttcacaccaactgagaacaattgccatgctctccccacgtcacagagtaaaggaactggaggttcagagactggcccaaggttacacagctaatgagtgggagcactgggatctgagcccaggacttccttcaaaagctctttgttttttcatccttaggcaatcatcttgagccttgtctatttgtttattattttttaaacagttttcttgtgatggagaatacaattcacccatttgaagtattcaattcaatggatttttgtatattcacagagctgtgcaaccatcagtacagtcaattttagaacatttttgtcacctccaaaagaaacatcattccacatttccttcaactctatccccatcccagccctaaacaatcactaatctactttctgtctttacggattttcccattatggacatttactctaagtagatttatacaatatgtggtgctttgtgactggcttctttcacataccataatgttttcaggttttgtccacgttgttacatgttataaaatgaatgtttgtatcccctgtaaattcatatgttgaagccctaaccttcagtgtgactgtatttggagacgggccctttgaagaagtgataatggttaaatagaatcaaaagcttgggccctaatctggtaggattaatatacttataagaagagacaccaaagagcttgctctctctctgccatatggggacacagtggaaaggtgaccatttgcaagccagaaagagaaccctcaccagaaactgaccctgctggacctcaatctgggatttctagctggaccacgatctgagattactgtaagacagtaaagttctgtagtttaagccacccagtctgtggtattttgttatggtaactctagcagactaatacctaccaggtattagtagtttattattttttatggctgaataatataccattgtatggatataccaatcttgtttatctattcatcaactgatggacatttggctatgatctcccatcccctcattctccctacgccaccctaaagcaaccactaatctactttctgtccctgtagatttctctgttctggaaatttcatacaagtgaaatcatataatcttgtgactgacttttttcatttagattgttttcaaggttcatccttgtagtagcatgtatgagtatttcactccttttaatgaccaaataatatttcactgtgtggagactgtaaatgttgtttatctattcatcagttgatggacatttgggttgtttctacctttgggctattatgaataatgctgctatgaacatctgtgtacaactttttatgtgtacatacattttcatttctcaggagtagaattgctgggtcatacggtttggcccacgttttagtctctaaggttttgtaagtccttatggaagttgccagggtactcaaaatacgtagaggtagcagaatacagaagaattaccaaagggtttatgccgtatttttgaaatttgataattatgtttcccctttctgctccacataggaacactcgatggaattatagaatcttagaactggaaggcaagtgagaggtgacctagtctcactgtttaattttaaagatgaggaaatcaaagttcagagactgactcacttcccaggattgtacagctgggtcatggctggacccagaccacacatgtaatctctttttctctcaggcagtattttccactggggtaacctctcagagagggagcagttcttcggaatgaggctcagttgctgaaataaagatgcttcgtatattgtttcccactggctgaagtctatctggagttcaaaactaggtcatggtaattctttgggaaatgccatgcagccttagagaaagcttgtctttcaaagccctttgattataggaaggggtgaagtcccagtgaggtggtgggcttggggattgtcacaaaagggtgctagtaagtattaaagaaacatacttattgaagttcagtgagcaatctgatttcagcaaagtagaatgtgactgtctcagagcctgatgatccaggaggcttacagatgtcaagattcacaaatagaaatggaaatttaaaaagctaggcatgagatgagaagtcaaaagttaaatgatttttaacttttttttataactataagttataatacctttcacaatacgagaatcaattcaataagttctaaagaaataagtaactataaaagttctcattgaagagggttagtgaagatgcatttagtatgaatggggagaggtgtataaatcatgatactgggatgacttcccaagttacttggtgaaacaagcctttgttagcagagatagataagagtattcaaaacagcttactaaatgctcttaatggcatctcagtttcaaataagatatgctactaatttattgagtcacttattgaatattttatacattgaaagaacatcttgatttcataatttcttcaaaacatattttgagatgcaaagagtagttttattgttaaacatttcatgaaatatataaaattattggcaactgaatgcaagttccaaaatctgaaagatgtacagtgcctcagtacattttgtagcacagagacattcagggtcatttaaaaattgaagcaaataaatagtcattatgtggtctaaattaaagtacagtaatttcgaaaattcaacaacccatttatgagctatgtactctatgtaagccattgtttgcttcttagaaatgcaaagattaaccaggtatcatttctactgccagggaatttacaatttagtggctgaagcagcatttaataagaactttattggcaagagaaagaaagagagagaataatagaagcgtaaaggacaggcctaggaaatatagttttcataatcatcttgtaaataaggatttataaagcctgtctcctccaattagtattaaagatgccctgtggaggctaagccctgctgaattcaggatatagatattactgtgatgagatgtatgtgattggagaaggacatgatatatatggaaaatgcttaatgattacttgcaggggtgaatagtgataaattggacattggctttaaatattgtagagtaaatggatgtagctgatgaagcttttgtaaactatgccatccatattcagctttctctagtttttcgattttctagcttccccctgcaatccaggatccaactgagtctttttttcttaatctagtagagcctctacatcttatttgttcttcccgatactaacatttttgaagagacctgtccagttgtctcgtagaatgccctacattccggatatgtgatgatttcctcatgattacattcagattacatatttttagcaagaacatttcatggctgatgatgagtagctctaattgtatcagattaggggcacatgatgtcaggttgttattccctcagttgccaatttactgtcatatctgcaaaaatccaggaaataacttggaccttcttctcaaaaagatagcctaggacatttatctgtcagtttttgcttactctgaggcatgcgatgaaattgccttaggcaacgagagacctcttgcctggggggtagaaggggaatgttggtcattaattttttctttctttctttttctttttcttcctttctttctttttctttcttttttttttttttttttttttttgagacagtctcgctctgtcacccaggctggagtgcagtggtgtgatctcagctaaacctctgcctcccaggttcaagtgattctcctgcctcagcttcccgagtagctgggattacaggcatgagccaccacgcctggctaatttttgtatttttagtagagacagggtttcaccatgttggccaggctgatttcaaactcctgacctcaggtgatctgcccgcctctacatcccaaagtgctgggattagaggcttgagtcatcgtgcccagctaatttttttttaatcaactgattggcattaggtccagtgatgtaactattgtaacagttgttggagtcatggctgttccaatcctaggggttctgtacacttgttctttgtcccatccatgcactaattttttttgtgcatttatcttagttgtgagatttgtttttgttcttttggcttcatgtataagaatcttttcaaattggaagaggtagagattttaaacagggaaatttataggctgcattcctttatgcaataggtacttattgggagcttcctattgtcagtcaccttttcaagtgctgatgatacagtggtgagcaatacaaagccctgccctcctagatcttacattccagtgctgaagaccagttataaatagatgaaacatttgtaaaatgtctagtagtggttaagtgctatgatgaaacagtagggaaagtggttgcagagtgcgtctggggttgttaataagattagatggtttgaggacctctctgaggaggtgatatttgtgcagaaatgtgaataaggaaagggagcaggccatgcactgagaaccacccatgaataggtactgagatggtacatactctgtatgtctgagaaagagccaggcagcgggttgggcaactggagggcagtaaggaagggggagcctggtagaaaactggtggaaaactggaccaaggaagactgtccaagtacagtagaggctgagtctggtatcaaggaatcccagcaggctgatgctgtgtactcctactctacttctaggaaaacaggctcgaaagactgaaaatggctagtttaaaaacagagtttcaactgaggtcttccacttagtctcaggtagtatagaactgcattaaataccatttgacagatttgctttgcattatatctccaaggtgatactatagatactttaaccaaaacacaaattagcagtgggttacacactttccagctgggtatctctttgtaaagatatgcgaatagttttaaatcctgtggtgccataaaatgaacactgaagtaggagttggaagatctgaatcaatgaactggcctgtgggaaagctcttgaaccttctccagcctgagcagtcccacttagcacactgagataaaccccctggttatctgattggggctgctggaagcatgcgatgaaggatgtgtatgaacgtgctttataaactatgatgcatccagcaggtctaaggtattattatcatttagacctttgttatagttttgctaaacagatgcagtctattatctagctctcatttggaaggggaatgacaaatagttacttcaaggtacaatgcttcttaaagagcagaatctgatcaatgcacctgaaagaacctcatgaattactcagctattcttcaaaccagcatatctgaactaagggaatgatcacttttcattcccatttaaagctcctggaaatcagcatgctctgtgtgagaccctatctggggaatcttgagtttcgatgctggcttaataaagtagaaacagctttgtgcttcttggagaagtggaaatttgagaaggattggtacgtctaagttaggcaattggtaaagattcatcgagtctctaacataaatgggtggatggatggatagatggataggtagatagattattaatagatagctggtgctgtgggggattaaaaacgtgtgagaaatgggtagtgataataattatagctgacattattgagcacttatatattaccaggcatgaatccccccttcaaacaatgtgagataactacaattataatcccatttgacagagaaggaactacgatttggagaagttaagtagcttcctccaggtcatacagctagaatatggcaaggctgggatttgacttcagatctgcctgactgcgaacctgtactcttaaccatgtgctctctcaagttgcatatagtatccttgaggagggaggatttttctctaaggaaagttacatagtagtaaattatgtagaaatgaaactgaaaagtctgcacaggtaggaattcagtagaaaaacaaaatggattaatgggggccaaattggtcatgggaggtctgctggaagaggaggtcctttagcagggtcttaacagactggtaggacttgaactggaggaaatgagccagtgggtgatgctgagaggatccggccagtgcaaagatgcagaggtgggaatgagcaagatgtttatgttcagggacaagcaggcagagaggccttgtcctttatagaagagttcctgatgaggcatggggtgggatatgtgtgtgtgatagcattagaatggaaattactgtgaaaggtagaggaaggtaggccaaagagactggattttatcctattagcataaaaaatcctcagatggctctgaaaccagctagttatttaatcagagccgtgtctgaaggacttaatttggaatcagatttaaggacccattagagttgcaaaagattgaatgtaagtaaaaatatgtatgcgcatatgatattatcatgtatttgtgtatctctagttaaaaataaaaggaaaatgcacattgtttccctgagttatgaatactgcatatgcaaaatctcccagaattatgcccattccgtgtttaaaaagaggagttgaggctctggagaggaaattctcgccaaggtatagtttgcctgcttggcagaaaatgaggtgtgcatgttcctgatgcttccaggtttccttcccattcttgtgtttcatttttgctagcttggctgtgttccctctggtctgcataacaaaaaaatagttaccattgattgaaaacctacattctgagagttcacagcaaccaattataagaattagatggtattatccctattttgctggcaaggaaactgaagctcagaaagtttagaaactaaagtcacatatctagcacagtaattggcagagttagacttagatatcagtcttgtttagtcagaaaagccctgctccttcttctatactttgtgtggtggttaggagtataaacttgggtgttagctcttgctttctaagtgctcttgggcaggttattaaagttatttgtgtctcattttcctcatctgtaaaatgctgatagtcgcagtactcacctggcacattataagggctcaattaatctcttttatgatttttaaaaatgattgctttctatcaccaagttgttctgttggctgtaacattctggacctcagaaaaagacttaaattttggcacaaggaaaggaggaacatctttgaaaattcatttcagtttgtgcacattaatttgaaaactctaattagctatctattttttccctggggttttcttaacccagtttccacgttgctgctgctcacctcttcctctctgtgtacctgtcaacagtgatcacacactgctgctctggggtggaccctgtctgcctaatgttggttaagcaagaaagaacttgatgtctgcctgtcattcctgccttctcttgaacagggacgaactgcctcttctccaagagaaagggttattagactggccataccttgtttttggactttgcagagcaaggacaactcaagtaggatggtttgaagtttctcaagaagcccctcagcaggcttgaagacctgctataagagcaggcacccaaggcaaaaaagccaccaagcagtcatcaggaatgggtaaagaaaggattcagacagaaccagttcctacagggcttggtcaccgtctaaaatggaaaacttctcgccccatcctttgtgtgttcttctagggcctagaacaccagagatattcattaacaagttgctggcggggatcagcttcggtgtaatttctaagtggggctttccgggagctatgtcttccttgcctgactttaatgagcagttttatatgcagatatattctttggtactagtagtattgatttctcatcctgatttaaaataacctgaagttttcctgctcatctgaatgaatattcacaacaggaattaaatctgtatgtccaggactgcataattatctattcatttccgcttggaagaccagtataaaaaggtgagccatgaagtctttcggtgaccaaaatttggaattaaacctgttgcacctccatgaaaatattaatagcttttttttttacccagatgacattataaaatacatgcaataaatttatatatttgatgattgccagtgatcaaaggcaactcttttttaattttttctaataaattccccaaacttggaagatagcagtgaaatgaaaacacactaaataattaactagcacagttgaccagcaccactttcaatctcccaacattaagattatgatttctcagccagcctggtcaacagagcaagaccttatctttacaaaaaaattaaaaaatgaaaaattagccaggcatgatggtatatgcctgtagtcccagctccttgagaggctaaggtgggaggattgcttgacctcaggcattcgaggctgcaatgagctatatcatgccactgcactccagcctgggtgacacagcgtgaggccctgtctctaaaaaaaaaaaaaaaaagattattgatgttttacaggagtggacatctacatgtgcacaaatctgatccactggggctcattctgccattagccctgtttgtgatgcagaccatgcaaggcaatctgagtgtagtggattaatggtggcttccaattcaattctcctgttgagaagtggggtctatacctccttccccttgcatctgagtgggtttgatgactgatttgacatataaaatatggcagaaatgagtctctaccaattttccaggcaaagtctttttttttttttttttttttttttgagatggagtcttgctctgtcgcccaggctggagtgcagtggcgcgatctcgactcactgcaagctccacctcccgggttcatgccattctcctgcctcagcctcccgagtagctgggactacaggctcctgccaccacgcctggccaattttttgtatttttagtagagacggggtttcaccgtgttagccaggatggtctcgatctcctgaccttgtgatccgcccgcctccgcctcccaaagtgctgggattacaggcgtgagccaatgcgcccagcccaggcaaagtcttaaagagactgcagccttcattcatatcctgagaaaccagctgccatgcaaggagctgattactctgagacctccatgctgtgaggaagctgaagatactcatccagaaaggctgtatggagagaggtgtcagccagccttctcaggaaggtgccagacatgtgagtgaaaaagccttcagatcattccagcttcagctgcaaagtaaaagctactagaaccatgaaagataataaaattactacttaaagccactaagttttagggtggtttgttttctagcatagcaaaccagaagatgcttttgagtactgagaattgtgtatttctctttttacagataggtgctgggacctctgtagtttgatgttatcaaagttcttttaggattggcagagggccaaagaaccctgtataaattgctgcttctcttctgaattctaatttttatttaactttgccttgcttgtttgtacaaaattgtggtgaatataaatttccctttctctggcataatatacatgcaaagcaagtgttgcataggccagaagaaacactgggataggtaggaaaagcctacaaattggcagaaaagacactaaaaatgattagaaattaagaatagtatggtaacccataatatactgcttgcactaaagatggagagagacagagagaaaatttagtcttgattatttaacatttggcatcctagatgaaatgacaattgaaaatgattagatgcacaggattctctgacacccatgtgatgtatgtggtgtctggggaggacgggaatgaggtttcattccaggctttgtttctgcccaaactcatcatctcaacaatacaggtaatgggggttatagaggccttgttttggtctgtttattttgaacaatttaaagttggaattcagagtttacatagttgggagttgaagaccatatacccctgtagtgtacccatggccattctaaaaatcaataaattagtcaatagaaacacatatcagctagagtaatattcatttttcaggtttggttttctgcttatctttttattagtggtcagtggtagactgaggtcacgttgttcctacagatggtgtaaatatcgtttatcaaataccttccatgtgccggacactttgctgggtgttgaagattgttaggcaagtttcaccccagagaaactcacagaacttttgttcttaacacttgtttttctttatcttactacctgttttccacatattcagctccttttggatctttgcaaggatatgcaaatatcaagttgcttgttgctaatatttgtctttagcatttccaattctggttttctcaaattttacccaagagtatgagcacagaaataaaagcattaattaaatgcacaaaatgaaaaagaaaataactataaaacatagttcatcccccctcagggacacttttatattagtgtccctgaagggggctgaactatgctttatagttagcagtatacaggtggggtagaaagaaactccctgagagatgctttttactcttattccctgatgtgcagttgcgagtgaggtgtaccgattggcactaataacaatatctcctaacatttgcatagcgatttaaagctttcgcatactttatcctttgtcagtttgcagttgaggcgcctgatatttagagacgcttagcttgccataccactggggttcagccagagggaaaataagaagaggtgaaagagggtggtttgtgttgtatgtctggtaggtatcaggccctttagcatggcacttcatttaatcatcacaacaacctactgaggtgggtagtcccataaacaagcttatctcaccattgagggaattgaggctcaggaggattaagtgacatggccgaggcagtcaatgatgccagatgctgaattggatccagatcggcctgctttctgatgtcttctgacctgcatagagaatcttggtcacctgaccctaagtaaaagtccttcatggcggaatgaatcggatagccctttcctccagccaccttcatttggcaagtctaggccctggctcctgttgcagcttcccttcatggctaaatgagccaccggtatctttcatttcctaaaagcttattaaataagatttgaaagtcagggcttccataaataaaagatccttttttgcaaaattttccagattgagcgggggaaaaaaaagccctaatgtggtattttatttgtctatgtggactttttttcttttcatttatttaataaagacatagaatctatacaaggtacagaacataaacattatgtgagagatgttatatttactttcatcaccttttttagaagaagctgccaccaaaatggttttttatggaaattatatcttgttatgagtcccattatactgtcttatgattcccattatactgtcttatgatttttttcttttatcttcagccatttatggacattattatctcagaatgtgtgcctcagatagatgtgtcattgtgggttatgaaagctgactcagaaccatgattgctgaagggattgaagacgggaagcagccacgaggcacctgaatgtctttttttctggactgttaaatgatacttctgattcttgaatgagcctgatgagatagatgggcgcctgttgaaactctgagattcttgtgtgtgtttcattcatagtggaagatgctgtcgtgtcacaaataaacttagggtggccttgcatgtagcaagaacttcaaaatacttgttagattaaatttaaacttttagatgtttctgttcctctggaaaatggagatataatttctgctgtccaactaaagtgtttgtctggtgctgatttgcagagggtaggtgttgtcttagtggcccctcctgtctgtctgccaacttagaacaggggctgggagagtatttatccctcagtctgtttaaagagctatgagcccagtgaaaacacatcattttaatagtggtaaccaactgtcctccaaccccattccaattaaaatgagaagaaatggaccaaagcaacaaggcaatttctattttacaaataaaacgtttctaaatttggagcggataactctggaaggttaatagaatcttaccatcactgaaggtcatctagatggatgtttgcattttctgtatgatgtttctaccaagattgtcatcatctcttgtgcccaccttccccttttccagcactgacctctgtcagaaggcctccccagttctcttctacttccttccgccatttctttagctcatcagctccttcgacttttccttctccactttcacccacataccagtggagaaccaccggaccccagtccccagctctcagtgtccttcaagctcctcttgaccattctctcccctgattactgctggaggggcttcttcctgtcccctctgcctctcctcactcccattcccccacttccccaggcaggcctgaggggccttctctgcccctattcttcccttctttcttcaaggtacagtctcacagagtctactgtgatctttgtcagcaaatcgctgtgttatcttagatgttcagtactgaatcagtgatttcaggaatatcacacttctgggtgcctctactggccatctgtaagatggggacacatcctctttctctgggcagttaattcttgggctctttactagaaagtctttcaaaactgtgtttgctgggtgggtgaggtggctcacgcctgtaatcccagcaacttgggaggcccaggtgggaagatcacctgaggccaggacttcacgtccagcctgggcaacagtgagatcctgtctctaccagaaaaataagagataataataactggtgtggtagtgcatgcctgtagtcctggctactcaggaggctgaggcaggaggatggcttgagcctgggagctcacggttacagtaagctataattgtgccactgtactccagtctgggtgacagtgtgaggccctgtcttaaaaaaaaataaataaataaaccccaaaccccaaatggtgtttgctctcaatatggagggtgccctgctgcatggcctccgagctctgggttcttctcaattcctgagtctgtaactctgttgatatgactaggtagctcctgcaatgtgccatggcatcagagttccatcatctagggaggcagtagagtggactagccacaggattccgagattacggaatgtgtgctggcaacagggaccaccactgaacccatggtaagtaggtgctctggttttttttttcacttctagctcttctttgatcattagatatctaattattaactcaacatgtgtttgtttttctggtgttatagatccatatatgcttacctacctatattgtaccattgatcatacattatcatagaatataggccacatggagttttacttatagctgtatctcctcccgccctttccatttttacctctgtagaggttgattcttctggggacttagacagatgatttctttgatagttcaggcttttccctaagttcttacttgccctcaacctggctacttttcagtatgcacatggtttttgaggtaagactgtgacccttttggtgtcttactaaattatttcatgactatgaatttttatattaaatagtgtttcttaccaagatatcatactcttacttctggagattaaacttggttgaaaatagaattttgggatgctctgtagaaattttagactagaaaattatcagtcttatgcattggctattggtcataagcatcataacctcctatgtggaatagaataattggagtcaacttcttatcacttttgaagttgaataaaatgaatctattttctccaggctgttgtttaactcggtgtgttgcctctgtatgatttttgttgtgatttttttttttttaccagatttggtgattgagagttgtcttgtttccacagaaatattattaatagaatagaaaattgatgatttattaaatgcccactacttaggcaattaaaatattatttagtttgatagagggacagttacttgcttgtttctatattttgaggtcatttttaccagttgatcaaaaacttacataggggttgctggttttctttacagagctaaagagacatttcattgtttatctaaacaatccacctgccagtttttctggggggtttatttcttagttaaatctactgggagttttccccgacttgagtttgactgcttgcgttcaaatccacactgttacttactagtgtgtggccttaagtaacacattgcttacccctttctctgcctacatttcctcatctgtaaaatggataatgattgtatctacctagaagaactattgggaagaccacacaagctaacctgtgtaaaaccctcagtcacctttattgattttcaaagtgtaccattttgaggaccattatagttgacctgtcagtttaaaaataagatgctgggtttcaaatttataatcatcgtgttaaagatttgaatcaagctgatgtgttataggcttggcatagagaaaatactgtctagagtaaacatcacagctgagtggagaaaccgccagactgacaaccagaagttctggtttctgctccaagttctgtcaattatgagcttggaaaaatcacttcactgctctgacctttagactccctatctgtgaaaatggggaaaatagtattttccttgctgagcttacatgactcttaagagaagtaattagcctttgtcaatgagagaatatataagaacttaaaaaaaattaaactgcatactctgcagttgtgaagcaggactttgactgaaggctggcagggattctagattcctcagattttctctagctcggttaaaaaaaaaaacaaactcaaggcacaaactatctttagtaacacccaagcatttggaagatcagattgttcatgatttcttaatgaatgtgttataaagattcattaaattaatgaactgataaaaattagtggcagtgatagggaaaaaaattgacaaatgttaatttttaatttttttacttattcctcacagtggttctcagttgggagtatgagcttctggaaatgtggaggagggaacattttttattgcctcagtgactgaggagtcacactgacatttggtggacagtggctagggatccttactcctcaaaacgcacaggggaatttgaggaagaactgcatggtcaaaattctcatagagcccccattaaaaacaacttgttaatacatctgatttctatacacttatatgggttatactgtaggtacatagccagtactattttttctagaaaacaagtggctgtacttcatgctttgataaattgaagatgcttctcccacttctcttatcttcactgattttattttcaaggctgtagccatatcctgtgacctctttgcctctaattctctatagatgtgtgcaatacagaaagccaagtgtgggtcagcagttgatgctgtcaaaagaacaagtaaagcctctggacactgttagcagaaaacaatcttagaactttatttttatttgattttgaacaggtagtactttcacatggtttagaaattaaaacaacatagaaagtgtactttaaaaaacctcactctattctagttctactgtctccattattctccatctcctgtaagttgctgtctttattagtttcttatgcttccattgtttccttgtgcaagcaaatggatctatttctattcacccccttttcttttcttttttttttttttttttttttgatacggagtctcactgtcgcccaggttggagtgcagtggcacgatcccggctcactgcaacctctgcttcccgggtttaagagattctcctgcctcagcctctggagtagctgggattacaggcgtgtgccaccacgcccaactaattttgtatatttagtagagacggggtttcaccatgttagccaggctgatctcgaacttctgatctcaggtaatctgcctgccttcgtctcccaaagtgctgggattacaggcgtgagccaccgtgcccggccattcacccccttttctaagacaaaagctcttgtttgcttggttttcagcgtactcatcactagtgtagttctacactcttccccaggtgtgggctgttctctttaacgtatttagccacagcagctattcatctgtttcatcttgttggggccatttcttctggagcctctgaccagccccaggctggactatctgtgccctaggcctgccatactgggatttcctttcaccgtcatccttttccctttttgtgctagctcccatttcctggatcctctttctttgtttactcccttattttcatggagcacatttttcagtagctttcagagaaaggaaggaaaacttttagacagtgcatatctgagcatgtctttatggtgttcctacaatttttaaaaatactttggctgggcaaaataattctgggttgaaaaatatactttactgttagatgagtgattatgcaggtcatatttaagtatgtaaacttatttcctccaaaaaatgggaacattaatttatttgagctggatatgcttcaaaatgattctgtctttgatggaacataaggactaataaataacatagaaaaaattcctaaattttggagagctaacctttgattctggtaccatgtctcttctaccagaagttaaggatgtttttttgaagctggaggaagggtatcttttagtcaggtgattaaaccttgatgtaaggatattatagacattgttcactatatcacggtcaatctatgaaggaaaaaattttcacactttattaacaataatagcagtatttcccttggttttggaaactgtgagtactgttcctgtttccctctttagtccactgccaggtggttcacagccaaattcgagacccacaactagcattgtgaaagggacctctttgcctgtgcattggacaccgaatacatttttccttaccctttacttctctttagactggttgccttactttcttttcttaattttgttttgtatgcatctttgccaacttccacaaatcctttttgaatggatggaggcagcagtaatggaataaaggttcagaatgtcttaccttaaacagcctcacatgggctttctaaagagagcattattttccattcaatttcttaagtcttttgtgctgctgtatttatagtaaaagtggtaccagttatcgttagtcattattgcaagaatgctcaacaactagctattcaaaactaagttaatggaagcctacagaaatatatgattattagcatttcttgtttgaggggtttaacaccccacatagctttcgaatttttcctctgttaattgagaagcaactgctgacttctatttgatagattcctaagaaacagacgtgatcactttgcttggttccagaaataaataacaacagtggttgtagcaatgacaataacagctaacatttattgagctctcattttgtgtcaggcactggactgtgtttaaatgcattatttaattcttccaacagccctatgaggttgatattaaattacttccttgctctttcatgccaaatccccctgaaactcccacatatagattaatctgaccatctgcttctcacttgctttctacatttctgaaccctcctgggaaaaatcactccacgatgtaccttgatgctcctagacatttgataaagtgttgcccctcctcctgcccccacatgccttgttctgagcagtgcacagagactattttaagacttcactgctccctaagccctctacttcttgaccttacctcctagttgagagaaccctgaaccctctccttcctcagtttcctgctcttacacctatgaagctatttcctaccatcatcaccctttcctcctttctaaccagtgatcgttagacagcattgtgcatcttaattacctgggagcttttagaaataactcagcctagtcctcgtcctgaagaggaccgttcagtaggtctgctggtgaggtgaggaggaggaggagcccaagcctgtgttggctgtaaaattgccacaggagattctgatgggctccctggttaagaatcactgggtcaggttccagaagacaaagtacctctttcattcaagggtgatccctcacctctcctaaatgaaaattcaggagagaaggaaatatggagctctggttcccagcttcttctttttttgttttcttcaggactagatctgctctcattattcctgtctctcctcagttttcattgacccccttttccctgtattcttcactagcttccaactagatatgtgtttgtctcaaccctgtgagcactggcctgattctcctgctattcccaggcaaaccccttaaagaaagattataacatcactcaggtatacacaccactttgttattctgacttcagtcctccctgaatctggtagagatcatcagcaccagtagaagccaaatccgaaggacgcttttgggatctgtctcatcttggtatctttgggggcatatggtgcttaggagactctttccttgtctttgtgacaccatccactcctagttgtcctgcttaatttctttcatgtgttaagtgtttccaaaaaatatttttcagcaacattaagaataatatggaactgtatttacaaaaaggaggatgtggaagaatattcttggggaggaaatgtctttctggctggggtctggatctagcactttatttatttatttatttatttattgtgagataggagggtctcactctgttgcccaggctggagtgcagtggtgcaatatggctcactgcagccttgacctcctgggcccaaatgatccttcaatcttagcctcccaagtatctgggactacaggaatgcactaccatgctcagccaattttttgtaaaattttttgtagagatgaggtctcactatgctgcctcggctggtctcaaactcctgggcttaagcaatcctctcgccttggcctcccaaagtgttgggattacaggtgtgacctaccgtgcctggcctgaatctagcattttctatgaggaaaatgagaacaccaggggaaatttggcatgatttcttgaaactcttgcaaatcaaattcagaaaactagatttaggtcttagatttttgtcctagatggcaagggaactgtgggcccagagtatggtttctaccaatttaagaaaacccatcaggtcccgggtccactctgagtctagggcagatctggggcacccagggtgtatattcctgtgagagccttactcctgctgtgtcctgtgatcctgacaatgggccagcttcccagaacattggtggacagctgtatgcagcccagagtagaacagctcggcaataataactttttactcctttctgctttgatttttattacttccccacctcctgatttttccatacaaaagtaaagcatacttgctacagaaaacttggaaaatactgaaagagaatggagaataaaataaattttttatcactataatgtcactcagatatacatgccactaaacacgtatattttcttccagtcttcttacttttgcaagcacacatatatatgtttttataagtaaaatttggatcaaactgtatatagtgttgtttattccttttttgttttttggtaataatatttattgccataaaaaattcttatcaacataatttttttatcggttgcctactattctctagcattgagatagtcataatttatttaactaggtctctgttgtttaacatttaggctgtttcctatttgtactcttataaataatgctacatttaataaccttgagcagaattgcttgtgcattgctggtgatttctttaggacatgtttttagatgctgaatattgttggatttctgggtgggaccagcactcttgtgattgtttggcctccagctaaacctgcctctgggagggagggaggctcagggtccaagggaatttgcctgctcctgtttgcatctacttgagctcttttagactgcatgttgaatttcagaaggaggcatcaaagcatttctccaggaatccataaatggcaagtcctgccacaggtgaaattgagcacatatgcttcagaataattccctatttgatagagactggttttgaattttctctattctctgcatgctttggagaaattctgaattatttcaaagaacagcaatggagcacctacaatttgtcagacattgtgcttacctctgaagttagaaaagtaagtaagctctcaaggggctcacttgcagtgtagaagacagagaagtgacctactgtgggtgagaagtcccctgggagcacagagaggagagcctctgattcttggggctaaggaggcagcagagggcaagaacacctgtgctgcagaggtgaagtctgagctgagtcttgaaaaataagaattatttctttcgtacggaggggaaaaatgttccagggaaagggaatagtgtgtgcaaaactgcagacttgcgatggttacatgacacgtcaaaggaaccatgaatacactcccataggtagaatgtaggtagaatgcccctacctcagtgacataccaggtgatggggctgcatagacagttatcctttcattcctggggcttgagcccagttgttcatttacctcagtgtgccttatgaaaaagtttaggtaacactgatttggtacatagtagaaggacaatgggagctgagctggaaagttggactgggtacaaattgtgaagggctgtgtgggccataccaagaggagtttggattcctttgtcagctgtttagagatagccaatctctctgtgaaacactactgtgcaggtactaaatagaagatatggattcccaagttgcttaaaaacacagaagctggtgttcttttacgctatcccaacaatttcgtaacatgtatttttccccctaaataaaaatgtgatgctattagctctgtatactgacctgtttcacacctctttggggaaaatattgcaatgttggaactacacagtggaaacttgcagttgtgaagtctgttttgagctggaaaaaggtgacagtctaaggaggaatgatttgaaaagtgctaatagtaaaacatcagttattttggtatctacaaaagtctgtgctatttactgtgactggtgtgaaaagaatcagtaaatgggaaaattgtgttttggccaacataaattaaaagtatgcatatcaccagcctgttgtattttctttctccagcatttcttattcattaaatatcacttcatatctaaggtctaagaattctccagcagtgtggttaagaataagataaaaatgttgagattccccaagggatattagacagcagtttcttttattatttggttttagtttgtttattttggtaagtgttgtaaatctagaccacagaaataagcataaaagaaaaaaagcgtgtatgttgtattatagaaatagtttcattgataaactctacatactaatatctaatgtatttggattgcctgaatgtgtttgggttttaggaaattataatatacaagcctctgtatatgtgtatgcattttctttaagatataaacatattacagtgatatctctatatttcaaatgtaaatttttttggtaagttgtcattttgtaagttcgattgtcaatacaaagaggtgttttattttctctctgttcttaactaatttcacttcaagatgaggggaatgtggagttcacatgggtagctgggcagtcagcatgttttcattccagtcacgataggatactgagaatttctgcttcctaggtcctcctagtctacatctctctgagcaatagtttacttgagtcaaagacattcagaaatactgtgttaaaattcagaggcgttactgtgttggccaactttttaaccccccaacatagctaatgtaaaggtgaataatgtactccttggtccgtcacctcactctgtccatcaatctgtctgtggctaacaaaaggggagtgtagcagactgtagaaaacaagacaagtgttgagtaggaaaatcagagacagatgcccttcgcactcttgtatcaaaggctttagagactggcacatcagaccaaaagtgatttgtgagggtgtgaatagattttccagatgccacatttcagaggctttcagatgaagcttctgctccttaatctctttccttctaccccttgcctgctttctcttcatgccagtgtatttctggcaattcagactcttggtgagaagtagatttaatttttataaacatacttgctggaagtcattggtctgaaaaaattgtctgtacctaatgcattgatatttctgtaggtcttcaatatgagtccatttttatattccatctttagtggtttcatcattgaagttgtcaacacagacacagtagactgaatcaacatgaaaaataccttaaaaatggtagtctgagagtcaaaagaatcaactgagaatggctaggaagtggaagagccttgtttctactaagtcttctcttcttgctactggctttctttaactgctagaaaatttcaattcttagaagataggatttgcacacctatgaataattgatgtgtaactacttatgaagagttttcactggcattgagggcctgctgttggctgaataggttggtttagcaccataagtcactgacatacttttagctttctgccacctggagatcagtataaaagctggtgagttcagcttctcaaaaggttaaacaattgccatataaccaggcaattctactcctacgtattgtgtacccaactgaaatgaaaatatgtctatacaaaaagttgtgcacaaatgttcatagcagcgttatttgtaatagcctaaagacagaaacaatacaatgtccatcaactgatgaatggaggaataaagtttggtgtctccaaacaatggcatgttgcttggccataaaaaggaatgaagtaatgatatatgctactatgtgaatgaacttacaaaacattatgctaagtgaaagaggccagtcacaaaaggtcacatattgtatgatttcattcttatggaatgtccaggacagagaactccgtagagaaagtagatgactgattgcttagggttgggggggcagtgggtgggaggatgaggggtctgaggagtggtagctacagggtatggggtttctttttgaggcgatgaaatgtcctaaaatttatggtggtgatggttgcacatatctgagaatacactaaaaaccattgacttgtaaactttgattggatgattgtatggtttatgaattatatcttaataaacctgttttttaaaaagcaaggagtgaaaaacacgagaaacataaaattcaagacattaccctgggctatgagaggagggtacatcagggaaagacagtcagatgatttccaagtggtaacgttctgtttcctaagtttcctaagcagggtggtgggtacacggatgttcactccgttcaatttattattatttgaactgcacgcatatgtcacaaatgctcatggtatctgtatttcataagttaaaaataactgtaatctaaaaaacctggttaatcgtagaaaagatatcttttcaatatacagttttcaaatatcaaatgtctttctatggatacttactgttttatcttattgtcatttgtcatcaccatgcctatttcctagtacttcttgagtgcctgtgtccatttccagtgtcctatgcaatgtaatgggacatataatgtaggctctgtatttaactggagaagagatgttattaatagttgtaataattgcgaccatttttgaggggcctgttaagtgccaagcacggttagaggagctttatatgcaatctttgatttgagtcctataatgaccctatgaggtgtgcctgataatccctgttttactgatgacaaaaggaaggcttggagagattaagtaaattgttcagaatcaaagagccagttagcgagggatagatccggaatttcaccccgtgtctgtctactgccagaatctgctgttaacgattatgccatattagcttttactgtgccagtttttcctgaacttctaaaactcatatctccctttgataaacttcataaaaatatcatgtcttttccccagttgagaatctcaatcgttttttctttctccatcagccaagatcaccttatcaagccgtatattgtttagtttataatgcagagagcatttgttttctaggtataaaattaaaccaaatatgtgctctcaaatgacgtatttccccggagttttagacatgttctctcctccccctgcaacacacacacagctcaagaatcttaggtgcgagactgttttgccaatctgagaatccatttttaaaaaggtgcttcataggcaaaggcagtatttgatcaatgccagatggatagaatagcaggtaattttcagtggagcacaaataacaaaattatagaatggaaagaaactaagaaacaatttttcttgaattcccatttgttttttagacaaaacccaagagtaacaagaattgaaatcctgtttggttgctgatgatctctaaaagctaggtgtcttatgaactgaggatgagatgtcataaggtttgttcatccatcctttcaattatgttttgatcttcaactccatgccaggcagtgtccctggggtttttcatcagaaatgtgcaaggcacaacctttccctttgtggagatcttggtcttttgggggacatagatcaagagccccaaattagagtgtggtaataatataataaagcataggaggctgtgggacctcaaaagattgacatttacttcaaccttggggatagaagtgtcagagaaagttttcaggtagtcaatacttgagcagaattctaaaagttatattgagttcagagaaattggtatattgaggaaaatttataatttggcaggagacaaggggagatgagctgccagtgttggtctgggacatgtcatgaaggacctctgactccatgcttacccataggtaaagggaattcattggctggttcaaacagggggaagggtcacaggacaagatttgccccagataaaaattactctggtaccagcctctgaggatgcatttgaaagaggaggacaagttcaagggaaaagatggctgtactcatttgagaagttttaagcatttcgtccatggcatgtgcaattgattgtaagatgctatattattttatatactaaaagaagaaaaccagaatcttaattttcagatgcatcccaattccagaaatgtcaaaatgtgaaaaaatatgtattttagacttgatgaattgcagtaagtacttaataaatatcggtcaaaagaatgcatgaatcttttctgtccgtgtcctgtgtagatttggaatagaataaatacctgataaatgaacatgacatttgatttctaagttgtatagcttcccttagtttgacaaatgaaaattacgaaagagatcagttactgtgttccttgaaggcttgtccttctgttggtattaacagtcactcttgatagcaagaattttggagaaaaaaggtttgagaaatggctgaatgaggaaactatgctatgagagggtaacgttattccctttggatttcaggcctaatagtgaaagctgtgtttgagaacctactggctgcttgtaggtccatcatatggttcaagaggaggagtttaaaaaccagtggtagggtcatggcatgattgaaaagaaatatcgagggataatttagagatctgcccttgggggcacttttaaagggaaattgctgtttgtaagctgctctctcctgcagcagctgggtatttcctgaatctagggcctttcttgtctgttttccccctatatttgctcagtgggattccagccaggaatgtctaagagacaagggcagctgggtctgcactgaccgcgagattgtattttgcttctgcggctgttttgcttcagcttgcaccatttgggggcacttctacaggcagaatgcagcaagcactgccaaacttagatagattctttgcattctccatgtgttcgtacttgtgcaacctgagaaagtgcactgagctaggagagagtgggcaaggcaggtggtggaaagtgctgtctgctcttagacatactgaaaaagtgggcccttttacagtggttcctagaaatgcctgcattgtaaagggagaaggctcattttttttttattttaaaatgtgacagaaagcttgtggaagtgctttctttcagataaatggttattactaccaaggattattactctttttgcccagaaaatagttgaaaatttcctcactgatgagacaaagtatgcattgaatacactgaatacagtatgataactgtattttctttctttcttttctttttttttttttttttgagacagaatctcgttctgtcacccaggctggagtgcaatggcacgatctcggctcactgcagcctccaccttctgggttcaagtgattctcctgctcagcctcctgagtagctgggattacaggcatcccccaccacaccctgctgattattgtatttttagttgagtcagggttttgccatgttggccaggctggtcacgaactcctgacctcaagtgatccacccactttggcctcccaaagtgctgggacttcaggccgagccactgtgcccagcctgtattttcttaataataaaatatgatcaacgctgatggtctttgggaagatgaaggaagtgctgttttcatatgctgaaagtgctacacattaattatgtcattctgcctttatctggtcttgctgactccatccctctcctcccctttctcatagccaccagtttagacattgtgaccagattaaatttctggaatcacccttttcaatatacagttttcaagtttcaaatgccattctctggatccttattgttttatcttattgtcatttgtatcactgtccctatttcccagtatttcctgagtgcctgtgtccatctccagtgtcctatgaaatgtaatggggcatataatgtaatttctttttaatgaattagctgattttgtgaggacttgaaaggagattttgagcaatttgttaaaattctagttattcttcagcaattatagagttttgggaacttctggattatgaagttcttttcttgcagacattagcaggtttttcttggtgtctaggtttttctaagcattgtcctttacatcttatggtcatcaaaaaaaattgtcctacaggtgtcttgtgacagaaaacagaaataaatatttttggaaactgaaggttggtttgcatctgttcactgatcacagttattgttatatactataggaaagggtaagactttttcatccactattttagattcagtactgggggcctacaagttaactgaaaaaagacagattaacaagagaaaagaacagatttaattacatacatatgcatggaagttcacaaagaaatataacttaaggaagtggttagaattgggggcttatatataccatcttaacaaagaacaataaattgtggcaatatgacaagagaaaagaaaggggttttggacttctaggggtacttatttatgtgaagataagtatatggggaaaactaatgaaagataagatttattacagtcaattttgtttatgcagattgaagtcagtgccatcttcagcaataagagttgcctcctcttcctggtatgggagaggaaagagagaacatcttcactgaggaaaatttatgccctgactttaggcagatacaaggggagtagacagctttatatacatctgatgtttgtcagttgcctttagctcaaaataattcttatgccatcatggcatgttttagactgacaaacattgatccccttcggtacaaacactgttcctctattacacacacacatggagatgataagacagacaaaaatagtttttgtcttttgggcttacagtctagatgaaagacaaatcatcccagcgaaggtgatttatgtgagataaatgcatctcacatattacaaatggtagatgcatcctctgggaagatgttaattagtactggaaaagtgcctcaacttattctcagatcactcaggcaagtcacagctcagcatttgtttattctgttatgaaatggaggtgaatatacacttgcccagcttgtgttgaaggaccgttgaaaggtcacctaagattctagatattagagtcctttcagatgatcagtgtttgggctccctttcctataaatcacacatgcacaaagcatagtatctagttttagcaggttcacaacatccatgggcacaggttaagaactgctggataaaatatagctccagtccaagagcagaataagccagcacagttatctcatgaaggataggtgtgaggttaatatgcaccctctctgccagtcagagaagcagcttgatggccttgaactttcagctgaaagctaatgtaccaagaggtgagatcaccaacatcacccagcatcatgttcttcctctggaggcaaatgccaagtgcagcatggcagttattcagcagcttctgtgaacctaaccaaggcatttagttccattaattgagtggctgtgtgcgagaccctgtgaaataggggcttttcataggcatttgcaatttgtaaacaactgctcagtccatgagggaatgacggtgagaacgaaaggccttaaaaagagatcgaaggtggttactgcaaccagaggtacaaaaagaggctgtaaccttgcatagttattatttattttctactttcagtcctacttgtgctgcattcaaacacggtgtggcagtaattaacactgagtgaaggtttgacagttgggtggcattttaatagctaaacgaaagtaccgagagtaattacccgggatctcttccatatggctgatcatgcacttgcacttttgggcagaaagaggcacctcactcactaggctttgctcccctttggtaaattcgtgccacaaaggctcagaggtctcctcacatgttccctgaaaatcaaatgtgttgataatggcttggcaactgaaggtgcatgagaaccttaattactttggtagtcaggaccaccttgtcacacagctccagaggaaccaatcaagatgtatttgcatcatgttgtattgtatatgaagggtgcctcttggggttgtgtgcagaggcacatcaggttgccagcctcaaaatagatgtaatgggttggcagaaacaaggggcttctccagggaaaggttgtcagggaatttgttgtaaagtttcaataatgaacggcttttatgtcttgatgctctctgcttcactatgtggctgccatattgccatttcattggaaaccctgatcaatcccctaagtacatgctggtaggagtacccctgtgggctggctgcacttcaattttaacacaaacattggcaaatggaggacattatcttcctaaaagaatctcctgtggccacatacatggcacagaacaggctactctatgttccgttaaatgattcatagatcccctaatgatgggtttaatgggcatgtaacatctgtccattaagattatgtcctcccaggtgctctaaagtttccatagcaagtgctctacaaatgttggtacctcgtggtgtctgcttcttgagactggggtcttgactttttattcatagatctttagtgtacagtacagaactggcacagagcaggcactcggaaaatatttttgggaattattaatgtgcaattgaaaaatctgtttatggttgctgacacagacttggtgaaatgagctttttgtatcaaaattttctaagtaatagtgttagccagcaccaacggacacagtttctggtacttccattgcagaagtcacattcccattgttttctgggcagtaggaaaaaagatggcatttttgaggacctaataagtaccaggtggttgtgctagatcccttgtgaacagattggagattgggcaaatcctgactttaatcacttatttgttgttttggggcctcaggtttctcttctataaaattaaaatactaatgtccaccttagagagttcatgtcaggattacagaaaatgcatgtaagtgcttagcacatagtaagtatacaagaaatgaacactgctattaatcaactcctttgtgtaacactgagaacttactgtcagttttgatactgttaaaaaactagagataccaataacattcaaaaactgtatgtacttcaagtagcttgcagtctagaggtggagttaggcacttaaacacatagttacaatacatggcaagtgctatagtcaaatactgttagaacacaaaggagaagcaactaagctctgctggggaggaggaaatgggatttaggaagggctttgtgtacacgatgcttactctgatttgaagatggaaatcagtttttaaggaagttgtttgtgaacagactaactgaaagcagttgaagtagaacacaaaggtagtgtgtgtgtgtaaggatgcctatgtgagtgctgaagcagtagggaagaagtcaccctttgtgggagacacagttcatccccaagacactaggaaactcaacaaagtaacatagattgctcagtcacatagctaatgcgtggcaggacctgaattttaaactgaaatgatttctacaatgaccagtgctctttgcatctttttatacctaattttaaaaatatgtaagttactacattttaaagtgttctttgtattacttcttagagacccctaaccttttcagaagagtatctctattcaataatgtgtgtcaatgggaagttgttatgttttataaaaataagattctaagccaggcctttctgtggtggttgttggacatctctgcccagaggaaattgattaggagggataagatggcactagaactggaagctgagggcagtcatgccagctctggcccaggccagtctttgtattgagtactttaggatatatggaaatcaccaaaatacatacaggctgtttaattattttgtatcactcctggagatggtcaagtaaaataaacacattaaatagtcaattagttcactggcagcaatctttctttggaaagatctgctcccccccgtcccctccccccacactccttgctcacctatatttttctgatagtacagtcattatttcagttctgttggagtccaagttctgaaccactaggccattttaactgcaaatttctcctgagaacatacaatcactctatccccacctgtaagataccgcaaaggggagaactaatgtttcctggccagtgctaattagaaacttcatatgcctcactcctagtggtttgaaattcataatcctacaggtggctttgatttaagccaaatagttctgttcaagagagaaagattactgtaatgacgcagatttttcacttcaattgttgtcattattcttaattcattatttgacttaataatcagctgcacaaaatccatctcttcctaaaaatatccccagacacatactccttaagtttcttatctcataaaagcatttgagtatagtgactgagaagggcacatgagagggattttgaaagaactatccctagaaagatttgaaacaaaatgtggaagatgtaagagccgatgtcaggttttggagatgtggctgtaggcttgctttagttacacacactggcaaacactggtatctcaatgtaggagacactctatctactagcattatgtagttagcattgcactatagtatggttaatgactgagtggaattcagtaattaagagtgagaatttctgcactaataaaagacacttacctctactgcctctcaagtaggccttcatttctgaactttgaaccactcctagaacagggaactgatagtttaattgttgggttgcttatgtctgtttcctcattcttctaaattgaagctgccctcttaatgattaaattattttttcaaacttttaaattgtaaaatatgtactgaaaagtgcacaaagcaaacatgctcagcttatttaattagcaccagtgtgaccatctctctatttaaggaatagaattgctctattatttgcctcacagaaaaacctccctaatccagagacctgggaggagcagggacattttatattgctgaaaggtaagacaataataatttttgaagaatcttattcccttttaggtttagacaataactgagaaaccctggagtggcaaagtttttcaacagaggtcctggaacaccacctttagcagagaacactggctttgatagagatgtctaattgtaattagcaagtgactggatgtgaatgatacttgactgaagatttttaaaaatgagatttccttttttatgttattacttttcttgaaatctattctatatggacaatagacaattaaacttctgttcagctctaatttcagtaattgcaaattctgaatgagtagaggtgaaataagaagcatttattgtgtttgaaaattagggctataaatggtataggtgagcaatacacttctgaatgtctttatcaaaacatccctgtgggtaaagaagaggaaactggaaaccctagagattctggtggactgactgagaaacctccactgcaaaccagaaatttgttagcatctttgtgttttatttttaaacttgatacaaacttattcatgtttaatttaacatattaaaaaacaccacgaacaccaaagtttttatggaaaataggctttccaaaaagatatgccgtggttgaatgcagcttcacagattctctgggacccagctggtactctcagaggaaggtatatttaatgatgtgaagatacatgtattcatctctctccgagttatttatttatttcacaagaaaaagtaaacaacaacttataaatattttcttgttgttgatcttggtaaaattatttacttaaccagcatttatgaaggtccccctgtagcctaggtacagtgcatgtagctaaagatattaacatgaatggagcccagcttcagctttggaaggagcaggagcatagctgagtggggaatacggatgtaaacaagttattacatcagagtcatttatgtatttgttcatttgcctgggagaagtgaggcctcaaacagcattttgttcaaaaaaatgactggcttatattctttatcgcatgcatgtctgccattttgtcatagccatgtgtgttcaatacttgaaatccatttgccttatgaaatgcttacggaatcctgatttctagaaataatttaaagtttgctgaatgcatatgctgtcctataagtgataggattgttttatcatttctgacagaaatgatacatgcaattaacatgtgttcttttaaaataatactattaacaaagcaagtttatcccctctactgatatctctgtctgtgtacccaaatcctgcaggtattttaaagtctagcttggtgcccaccttttccattcagctccgcttgactgtgtcagtttgtatcgatttcctgcctgtctgaactctctttgcatttatgttatgttctgcttgtctgacttgttagagcagagatcccaaactccatcctttctcctttcttgagcagggttcttgagaaatggatgatggaggttcctccagcaaatgtttcctctgtgttcctcgtcagagtggctgccacacacctccgtctagtctcaggcctctgccctgacagtcgtgagactcccttctgatttctctcttaacccctaggctgagagggccccaggtttgctgtgaattccttttcttctagggcccagctggtgtcccctcccactcctatcccagtattttcaaagcagtagatacctcagtcatcagcccactgagaaggcagagctacttgtcccctttggctcactcttcattctttccactaaaactccatcctcaaaccagtggccttaatgtaccgttttgacctccgtgtgcccttcatgtttggccacctttgagtgtgagctcagtttgtgatgggtatgttgtattttagtgttacttgataaacaccgacttaatcatttctttgtatttggcaaaattccttcattctctttagctcattttaactttagaataactttagttcaactctgagaggcaagcaggctgcctttattcttatttctacttgataggaaaagacaccaaaggctaaaaaatattagtggccttgttcaatgtcagaaaaattataaacgatgaagtcattttcagtcatgtgctcttctaaaacacagttcttttgcttctcttcatttatatttcatgtattttaatctatttttactaatctgacatgtcacttgagggccagctcatgccataaatatctgaatcctttaaaacaccaaacagttcaacttaaccaaacatttattggatataaagtgtagtcatttcctcatttagtgagagtctttatgtattagactccccgttggatgttttctatgtttcccctcattctcatcatatctctgctgggtagattttatcaatactttggtaccattaatatgcattgggataacttgggaatcttattaaaatgttaatcctgatgcagtaggtctgggcagggcccagatttctgcatttgtaacaaggttcccagatgagttggatggtcatgggtgcagtctgagtagcatgctgtttataggtgaagagactttggctctaagagattaagtgatttttcaaagataacacaactggaagtggtaaagccttattcaaatgctgatcttgctccctggagagttgccttccaagtgcagtaagacagatacattcaaagcgatctttggaatgtactttaatgtggaatttactctaatggagtgtaatgggaggaccttaggtaggaactatgatttgaatctgatctcaaaagactggtaaggctttgactgacaaagatgggacaaaaggactttttggatagcaagaacaaaaagggaacaaggacacagaatgcgggagtgtacagaacatcttctgggaatggtgagctggaggctgtagctgatgcctggggagaggtgtgctgtagctttaaagggaggctgaggttggatgggagagcagagtagaccggggaaccactgggagatttggaggacagtgtctgtgatagcacattgtaggtgctcaggaaatgtgcactggttgattgaatgtaatctagtttttagtcatctgttgcccatgttgcaccattgagatctccacagaattctgtggcctggctgaaacgccacagaattaccccaagatgacctttactgttgtttatatagagctttcttaatagtctctttgcctttggcaatataggacatattactttttcctccctttccaaatttttttttggctaagaaaatgctgcttttgcacagaccaataatacacattcttcttaaaagaagcattgttccttcagtagcaacttgtaatgggaaaagtggaacaaagacaaaatgcaattctggtctgaatggagaccagtttttctttgtgtgaataaccagcattccagtcaggttgccacagtgatgctgagattataactgttcatgccagcagtcagagaacgttgcccaattagttattctcagctgctaggttaccttgacagtggctcaaaaagcaggttttgagttcaaagacactcaaaaaagagcagtcgaggacttgcaattctgttgccctcagtggggtgcagagaccacaagctccagcatgctctggtttaggccatgtaggtgtagtcagccttgtgaacgtaggcaccttgtaaaaattctggtctttccttgccccctgtatcatcagccagctttggaagggattttactgtttctgggagctgccttcagatattgcacatgggagacagtgaggagaatgtatgttttggcattggaggctcttgtagcctcgctttttttctcttgtgagcaatctacttcacaggattgatgcagagatgaaataaaataacctttgcaaaataccctgcataatgtctggggcatggggagacattcagtgtgaagcagttcttctcaaatattgtttcaaaagttacaaagcattatacaatatgattattattatcatcagtttctggtcttttctattctttcagtcagagtagagtaggataggatatggtaatgaacactcttagaggctttatataactaaagtttatttctcgaccatgccacatgcctagagtgggtcagtagaggactccattcatcagctatccaagtaccagactaatggaggcatcatgtccacatatgcttccacagtcatcacaatgatttgaactgtcagtcacatattccatctggaagtggaacatcacttccatgcacactttattagccaaagtaaatcatgtggccccagccagcttcaagaggggtagggaagtgccatcctataacatgccagcaggaggagaaatagaacatttattcaggccgggcacggtggctcatgcctataatcccagcactttgggaggctgaggcgaggggattacctgaggtcaggagtttgagaccagcctggccaacatggtgaaaccctgtctctcctaaaaatacaaaaattagctgagcatggtggcatacgcctgtaatcttaactacttcagaggctgaggcagaagaattgcttgagcccgggagacggaggttgcagtgagctgagatcatgccactgccctccagcctggctgacagagcgagactgtctcaaaaaaaaaaaaaaaaaaaaaagatgtattcaacaaccttagagactgccacctctaccaaagagcaaaaggctaatggagaagagtcctttaaagaaggaatgttagttaaacataaatgaataaaaatatctgaacagtaaacttcaaagtaaatcaattagatttcagctgcttcaaacagaaaactcaaaatattagtgggttaaggaagatagaagtttgtttctctttcaagataaagaagttcagacataggcagcttagcggtagcatggtagctccatgatcgtcagaaccataggatcattttattgttccgctataacaatcttagcataaggcttccattcttaaattcacctcaggatcagaaatggctgtagtgttctagccattacatctgcattccaggcagcaggaaggaggagggaggaagacagaagaacccttctcccagctaagtcagctccatttgggcagcccttctgaatgccccacacagtaattctgcttacataccattggccagaatttagtcatgtattcattcctagcttcagtgggacaagggcatgtagattttgagctgggtgcatttcctcccaaataaaattggaatttttgttaaggagcaaggggagaatgaatattgggtggcattgatccatctctgttacagtaacttaagatgcaagctttagttaagtaggaatgacacagaaaagattgctctatacactgtcattttccattctatgctctgcagaatatcagtgcttagaggagatacaaagcttccttaaggagtgttctgtggccagacaagttaggaaaatatgaaaagctttgccctgtcttggagattcacagggtacattaacacattaaaagctttgagaggccttgcagtaaagaaacccctaacctgctaatctttttaacctagtgttcccaaacttatttgacagtggaaattcaacacccatggaaatctggagggacaaaaggactggctttagcttcttgagtctgccaaaaagcttttagatccttgaacagatggtataaatcccccgttccaaaatgttatctgccttgcaaaactaataagcaagcaaataaatttgtatgtccttcacggtggcctagccatagatataaaagcttgaaaaaaaaatagatgcaaatgaagccctgttattaacatctgtatgagatttataagagttggtattggtcagccatctgtaccattactggtgacaccaagtgatggactaagattggtttgtacctctgccagatgacaggtccctgctccaggtagctattattgggctcctggctgttcctacatggctctgggccatctcacccttctctggaaatgggagagtaacagatgatctaatcaaccagccaatatttccctactcatagaaaagtcctgggcccttggccgaaaggcattaaccctgcccctttcagtgtgcacaactcttgccctcatcagaggttccctctgcaaagggcaaagaaggaagctcactgtattgtgaagaggggtggggacaggtaggcagctggtaaagggggcctcatactcctattagacttagaatagagttaggtcccttttacctaaaagtttcacctctgcctgtaatcaacttcatggttgcttataggtgtaggaagaacagttgaaaattctttcaagcaaataacgtgtcattggtctgttgtaagcaggtggtaaatgagtatctctgggggaatggtcccgttaaggctcttcttccaaaacagaaccttgaattgtttcctaatctttctttcttaattatttaggtaaccagctcttgtctttaaatccatctcctgcagttgctatctttttcttcatctaagtatcttcaaaaaggcaaaaggccaaaatatttgctagtctggttcccatcatttccacctcgttttgctggaaatactggaaagttaccctgtcctgacaggtctggaaggatcccatgtttgcaaatctttgtaaactgtatgatacattttcccaaacagctgtataatctctgcaacaacctgatgatgggagggaagggaccaggttgagcaggggctggggttgggggtggtcatgtgcatattgacctttaaagcaacttgcgtgtgtgtgtgtgtgtgtgtgtgtgtgtgcgcgtgtgtgtgtgtgtgttttgaccaagtttcgcttttgtcgctcaggctggagtgcagtggcgtgatctcagctcactgcaacctccacctccctggttcaagcgatgctcctgcctcagcctcctgagtagctgggattataggcgtgtaccaccacgcccagctaatttttgtatttttagtagaaatggggtttcaccatgttggtcaggctggtctcgaactcctgacctcgtgatctgcccgcctcagcctcccaaagtgctgggattacaggcgtgagccactgtgtccggcctgcatgtatgcttcttaaaagacttttttagaagagctgagaaaaattacaggaggtgatggagagagctatccttctccaatatctgtcttgtggcttagtaccctgaagagttttcttaacttgccttatggagttggtgtgcctttctctgactctgaatgtgttagaaaacagtctctgaacacacagttggggcttgtgcattccttgtgtgcacaagcaggtttgtagtcgtgacttgggaatttcaggtcaagaagcatgagaagggctggccagtgaatcccagcagctgacaaaggattaaaatagctgtgctatgcaccaaaatcagaaaaaatattcaagtcagtgttacaagaagtccttggattgttctctttttagttttatattcttagttgtatatacttatttatgcaatgtaagctagtagacaataatcaatttatgtagaattatttgttttcatctgtaaggaaataattttgaactgagctaactgtgagtatgaatatgctaagtctgtgaaccgagaaaaatatattttgaaaatattatttatcttttatgctgatatatatgcatgtgacctactaaatggactgtcaaactggccatgtgcactaaatcttcttacatcatttctggaaatgaatgaaatcgatttcttaacccaactacctagattttgcaaaagaacagcagggcctgcccatcctacctactgtccctgtttccttcctttccaggtccactttttgaaaggcaatgggtgattccatcggtttactaaagggtgaaatcaaacagaaggaaaaactagaagtcaaaagacataggtcttcatttaactctgccactaactaggataagacctcagataaatcacctaaactatcttgctggagaaatctataactgcataagtatatagagcctgtctgggcctctctttgctcttctgtaaaatgggtagagatattttattgatatgatctcagaaatcctcgctgcaaatgtcacagaccttaccgcattgtggctgtcggtggaagaagtggtgatgtgaggacttgctccatccagataatatttattgaatatctctgatgtcccagtcatgatcgaggtattggagatactgcagtggacaaaaccaataagagttattcattcttggagtaaagaaattattctttcttgagtaaagaatttttagcgaacactttttaagcacttacaatatgctagatgttgctttacacattttatatatattaattattatatcaagtaatccagcaaagtgggtactaccattatcagtattttatagttgaagaaacaggcatagaaagattaaataacatgcccaaagtcatatggctagaaaatggtgaagctgggattcgattcaggcttttggctgtagagtctgtggttttcactattatgctataccgcctctcactgtcaattaattggttagcttaaagtaattagcattcatcctagctaatggcaaagtaggaaaaaaagaaactagctttagatagaaatctgagagcctgtttgctctccctctctggggcttctggctctgataagaggcagggacaccaagcaaccatggtatagaaaacttctatgctcccagccatttggctcattgtggtttcctgtcctgaggtcactgcccattctctggctctattgttaacccacaaggccttcagcatccccgtaaccccaggttaatttcagcattggccatttgtagagaaatgagtaataatggacttggattcaaaatacctggatttgaatcctggctctactatgaaccaatgttgtcatcaccttgggaaacttctcttaataccaccagcaagagcagtatgtctgtagccattatttattaagcactgccatgcattgtgctaaatgctttatatatgttgttttggattctcagaaccatcttccatgacaggtatttttacctttactttacagtctggtcttggctgctgtctctaccacttactgtttaatcttgggcaagttacttaattccttgacgccttagttttatcatctgaaaattggggttagtaatacctatttctcaggttgcataaggaagaaatatgaaaatgtatgaaaagcatttaggctatggcctatcccaatgacaacgataatgcctattatagcttattgtatagcttaaggttttgcagtgattaatccgaggagtgatgtttcaaatccagttctaaaggccgactttgtgaggacaggctggagctgcagggtcttgagtgaagcagctgagcggggagggtgatctaaagcagtgtcactgctggctgctgcacattagcaggtgaaactaagcagactgcaaaccaaacaggaggtgaggaggctccagtctccctgttctgagagatgaaagccaaactggaagctaccagtatcgagggttagttcctggaggtttggctgtgttctgccagtagccagctgatcattgaggagctggtattagtaagaggataccaacactagccaggaacagctctatcggagcagtttgtgtcctggaatcagcctacactcaggacagcccttcccaaaagacgatgcttgacacagggagctggggagttacctagaacattcatacgcaggatgcgacattgtaaaaatgcaggccaaagggcactttcccaaattacagatgaagaaaactggaatatgaggggtgaaagaactctagtaaggagtggaatccagacttgaaccctaattgttttggaccagtcctgtgataggtttgcatagtttaatttgtcctacactgatgatcaagtaagaaaaatcaacaatcagtattttacctacctatagccatatctctctcatctatctatctatctatctatctatctatctatctatctatctatcatctatctatctatctgtatatatttatgttttttacttgaattatctattccagttgagatgacttctttgggccagcaggttaatgaagatatgcttctgggctatattccagatctcctggatcaatactcttggagcaccttttctcatatgctgcttgtcgttatgatgatctaatcactatgtacgtgtagtaagttgctcatgtctgcttccttccttagattggaagcaccatgaagcaggggccatgtaccccactgcctctaccttggacagtgtataacacacagtaggtggcgagggagggtgccaggtagcagtcagggattaaataaatcttactgtgtaaagcaagacctttgactctgcaaacctctactgctttagaagaggggaagttaaagtaaaaaattacctttgagggaacttgcctggctgtgagtgcagcataaactagaatctgggggttgttgagtcagcacagtttcctaatgctgtactttcgaagatgatgttgaaaagcctgaagcctcaagataaatgtggagagttctcctactgttcctgttttctttgttctgttttgcttttgtaagcatatgcttgtcagttagggctgaaaccaaacaaaacagctgctaaatatggttctaaaagaaataacattttggtcttcttaaggcccgtaagtttagagtaagcacagtcgtttggcagatgtcaatagggaatccgggggtagcagtcattctgggagcactatcagccatccgtattctgttgggtgtattttaccctgccagaggactggtggcctcaagtaaaagattctgtcacagaacggctgtgtctttaagaggcgttttggaggaggggtgtctagagtctgtgtaggccatttgctcatgatccgtgtcaatttcattttcaaagaagtggggaggcattggaaagaatatgtatcatcttttatgatgtgaaggaaatagtcatcctagttacagacttaagtttgcctttttcaatctttgggatttagcccagtggtgttatttagtgttcttataaatccagtatcattcagaggacctggaggaattaaagcataacctagtggcagggaatatcaaaccctagatcttaaatctctcctctctgctgtgaagctgggcttgagcctgccaatgccatctaaatttcatcagctgaaagaaagagtatttatttcaacatccaaggaacccccaaaacttaatgcgccttctcaattgtctaactaatttttaaagagacatacattttgtccataaatacctgactctgtttgctaagcatgtggtgggtaatattattggttgaaaagcaataggttttcgtttactggccagattagttttattggcttttttagttgaaaatctataaaatgcggactgaattttactgtggcatattctttgtttattacatgaactcattttcaaagatgaaaaagaaaagggaggaagaaaatgaatatttattaaagtcctattacatatcaggccccaagctagtctagacactcacagttctcattgtatctcccaagggaggtaatcctgtccacattttaaagatgaggaaactgaggttcaatgcagttctgaaactggctcaaggttagagagctaccaggtggtaaaccaagggctggggattatggttccatgaagctatgatatagtgattaggaactcaaggtttggagtctgaccatctgagtcaacatcctggctctgccgctcattagtagtgtgaccctgactaagcatttaatccctccgtgcctccatttcctaatctgtaaaacaaagataatgatagcatccacttgataaagctgtgataaatgagctattcatgaaaaatgcttagaatcgtttctgacacataagtcctcatgaaatgttcactattactgtaatttttattgtcatgactaaccaagtttgcttttatcagtactggctgaaaaattacattttctttcaaggaatagtctaccttttgatatgtagttatatttcattatgaaataatgtaaactactctaccttagaattaaattctcttctcaccctcccagcaaaggttaagatctgaataaaggcatgtgtggccaacagggattcttgactttggtaaatgtcaatgatttgctcttttctccttggtgtatgtaactttcttccatgctgctcatcctggctttaagagcagctaagcaaacacaagagggagaattaagtggatttcttatctcttagctttcctgtctttgtaacatgattattaggtacagcttcctctccttgctgcacattctgttggccacattctgacagcctgtcttctcaatgcacgtgaggcacagtttactacaacaggctctatggattttatttttttaagctgggaatactacaggggcttttacatgtgacagttttgtccatttgggattggggtaaggaggatagagggcacagtggtaaaacaacttgtctagatttaaaagaaatgatgtaagtttgctagacctttggctctacattctgatcccattttttgtgatttgcactatacatgtcttgaagaattgggagtgggacatcaaccttattcagtaaatagttatatctagcagttatgtattggacagcatgctaagtgctggaaataccaagataaatatgttacagtgcttgctcttgaggcatttgtaattcatcaagggagagaaatgtaagagaggctagcactatgtgaaaatggttatcatagagctgtgcacaacatattgcggctgcagagagagagaggcagtgacgctgatttaagaagggcttcagaaaggaggcagcaagctgggctttcaaggatgggcttgcctcataaagaaagcagaaggaataatcttggcagatgggcagtatgaaccaagagctgagtgtggtatgttagggacatgagggacatgtgttggttatagtacagaatgatggaacacaaggctgggaatcgaggccaggcctaagaatgacatgaccttgactttcagtttgaaccgtatcttgtattattttaaatcatggagtgtcatgattagaaatgtctgttttagaaagatcagtatggagaatagcttagaaggaagaaagaattaactaaaagcaaatggtcccagaaaaagatgatgaagcctgttgtgtgaatggagtggagtagatggatatggtggacatttggagataagatcattgacacttagtgaacaaaattaggggagtggtggacaagggtggaaacttaggggaaggtacctagaaggtgtgagcagaagaaatattatagaatctgtgagagagactaagaggtatgatagaagatggtggagggatatattttcaacaggagtagtgatgctcaggagtataaatgcctcaaaagggacaactaggacaggactgagaagcaaccactatgtgtaagaaattgaggttcatggtgaccttttggggaaattactttagaggtactctagaatggagaaaacagctaaatgcttatactgttcaagctgtatcacaattctacaaggatgtaactaatgatgaaatgcatttgtgtgaaagactattcacaaacattcagctctccaggcgcttggattgggggaaagagagaagagagcctagggtcagtactgaggtgtcactgaataatacctctgacttccatatctagggtttcaaagagccccctccttgcaaataccatgactcatgctattttgctttgttactctcaggatactgtagactgtagatgcttatagacttctcttttgattccagactggttcttatttctagccatggtgcttgtagtgtatgttgtggtatgtcacacagagctcagttctccactgctgaggcactcagttgtccaccttctgggagtgtaggtagctagggatgacgttcatctgaaaaatgtcctcagctgaacagtgtcagttcacctaagattgttacctctgggacgggtattggggggcatcccacatgcagtgactagtcaatggagatgggatgcaaagtcctgatgcttccaggtaggataattctccagggctgtcctagctccagcacttccatggatcagatgaagtttttgttaccactacatttcagttcagctcttcctttggctcagtccagttcttcctttactccccggcaggtgttgattctgaggcataccccaataaactcacacagtataaatctcagggagtctcaggttttattcctggggaacccatctgatatgatgattctttccagtttggttgcctatgcaaggccagttgccagtagaactctttagttcctctgaactttacttctgaggcccttggatgtgtccagcaaaaaccttctcctagcagtttgaactaaaggctcagcattaagcctccttggttttgattggttgggacatatacccaagaatagattattcaaggagagaaaagagcctcacaagtcagctgtccagatcttcctgagacctacctactaaccccagctctgagaggggaccctgaggcgagtgacctttggatgtagaagctgattcctgctctgcacctgtttgtgctcctgccctcatctcacatccctgtttgattcccaggttccttgaggcagccactcatcactgtcctgtatctcttctctttctgttattttttttttagttaagaaaaatgaatgttgaaaacacaattgagctatttcaagcaaatgtaggacttctctccaaatatgttgcagaaacaccaccaagcaaacaaactactgggaagcacagcttagaaacaaacagcagctgccaccatttatgggctttttttttcttttcctcatttctttctaattccatttgtaataaaacctgctgctctaatggcctagtagtttaaccaacaaaatttttcttcccgatcctgaggcctcccaggtggccttgatggtgtcttctaactatggggtgttggtcgactcagagctctaagtcccttaagagtgttttccggttttgtggttctgtctggaaccacacctcccagaccaggtggggcataactggaacttctggacttctggatttttcaggacatgagcatggagtgtggtttcttgcccttctggctttgtaagagcaggtaatgtagtgctaactccaatctttctcagtgactaagtgcttaatctgttgggtgctttgtttgctttttgtttttgtttttatttgttctctgtgtggaatctttgaaggcacctacgcaggggcttttcttgagtttgatttaccacagattggactttaaagcatcctgacttgtcagatcaaactcatttttccctttccccagaatagcagataaactcattttccccttcccccatttaaatcctgctggtggtgtggaatttctcagcttaaaagtgattactattaggtgttaatagatttccgactacttgaaaggcattgtgcaaagcccacacttattcttcacaagagcatggctaggtagatgtcatccctgcagacccagacaatatgttgctttctcggggtctcctaggatcacacagctggtcaaggcacagctggtatttaacccaggtctctctgaatctgaagttcaggctgttccctccctgcctcttagccacccattgtaataatatatggcattgctcttatgtaagtgtccagtagagacaggccaaaggcgcagtctatttttatttgttcctaagaatgttttttaaattaagtgcctaaaacttaaaaaataggagatctcacattaaatacaatgttcagtttctcttgaaaaatctttagacctggcaatattgtgctcatatgttgacaagacaacaagtggctccagctaagtaaactccaccccaccccaccctaccataccataccctacctccctcaaggaggctcgggttgcccagtttgccacaggccccaactggaccactttacttgtttatgttactggcctggcctctgtagacatttaagtttgtgactcctagatttatgcctttaaagaagcaatttctgtccagttaggaatcagtaaggggtgaaagtcaatttctgcctctgaatagaattttattggctttgatttttcttttcaactttttgggatagtaattcagttataatagcagtaattttggatatttattgaacgctgtaacatttagctgactcctggggttagtggacaactgattggtggtaagaacttgaataattctccaatttagtttgcattctaaatcctgcagttactcagcaggtactgcaggaactggaggctatcctcaaaagtatattttgtagaggcagtattacagaagagatgaatccaaagaaaaactttctgagagaggtagttaagttgactctattttcccttggaaactgttgactaccataggtaagattgccccacaatgcacgaacacccttcttagctaccagggctcactcaacacaatgaacagctcggatatttcaaagagaaataccctggaacattagaaccttctcaggatgatgagtctttcactttatcttgctgtagctcctgcaagtgtgtttttccatttaacagtgagaaatgtgttacttcttttttattatttcacttgaaaaagcatctccttttgcctgatttaaacacatttcatagaaatgtaaaatggaaagaaaatagaacttggctaatttcatagctgcagctgacttaaattttaaaattttgatagtattaaatgttaacacatgagagcccctgaagctaaagttgttatttatttgcttaatttaaataagtatttgcttttgattaaggcaatgcctggaatattgttttgaatttttattgtttgtttattttctttcaggaccccgcagggatctttgaattggtggaacttgttggaaatggaacatacgggcaagtttataaggtaagtacattgagtctgagagtggcttatgtacggtttcagttcatgaatgacaaattgcagtgctgtctatactggctcataaatggctcctaacaaatttaaaatgaattaatatacttgttgattgactctccatcttttaaaatatatctgtggttatgttgcttaaactggattctgtgatttgggtatttcccttcattatatattactgtgtttgtatgtgacacatgaattctgatggcacatatttgaagctcttcaagcgttcagtttcctttacttaatcactgccagaactggtttttgaaagagaaaagaatgccatctacttcagaaatttaagctattaaactattacagctggaaaagtagatgtgttattggcctaggacatgaattaaatgagtggagtgaacagtgttggaagaaaactgggttacctcacaaagcaaaagcttaatagcagcgacgaattttaggaaataattaaaagttaaacttgagttgagactgagctgtggaataagaagtcttgcttgcctgtgtactaatttctgcttacaaattcactcaaaaagtgtttttaaaaggtattttccccaagtataatctacgaaaaatggctggttgaaaatgtgagttgattccttttctgattgtcaaaaaaaaaaacaaaaaaaatgaaagtgaactgtttttggactgaaacttttggggtttcattgaatgagctattgaaatgccatcaaaacaaaccaactgtttcctcatgataatttctagggaaatatccatcattttccctagtggcagcgatatgggatggcatttccattacaaattatctcgtgttctatttttaaaaattcctcctgagccctaaacttctctcagttaattaaatttattatagaaatcattcaggttgtaatattttcaattctgcagaatgtcaaaagtattatttatagggtattctcgagattctaagtggatacacatttatatgtttatttacgagaggtttcctttggtgtccaggggaaaattctcccttgcaagaaacgattatttcctaaattgtacaccttttaccattagacagaatgtagtctacccaacctgctcacttgacgttgatcctgtctgacacagaaagaaatgtgtctcagcaaaggcttttaaatactttcaatgaagataattaggttggaagattgtgttactgcattttgagaaactggattgaacttgtgaagtaactaatgaattaagctctgacttaggtacaaaattacttctgatttgctgtcaatatgaaggagcaactctgtagcatgctgttggttttatggtgccatttcttagagcctttccgtttcattatgtttcccacccatagaatatacatttgggagacatttcacagcttggtacactaattcaagaggtgaaactctgcagtcttataagaggagataccaagagattcaattaaggatgagaatatttggaaaatccagaattatccataatttcttgttatttgaaaaaggcaaggaaacaaatggcaagaggtctcagatctttttagagagggaagatatttagcagctaggttgtcaacattattattctaaaggattccattctcttggtggttgatacagtactatggcaccttccaagtttaagggagattctgcaaagaatggtcatggtgaatgcagtgaactttgggacaggagatttgctctcttttaccagccccattgttttgtagccaccacagcttttctgtgtattagtcaaatgagaatgtagttagagatgctttggggcctggccaggtgcggtggctcacgcctgtaatcccagcactttgggaggccaaggcagatggatcatttgagctcagatttcaagaccaaccaggccaacatgatgcaaccctgtctctactaaaaatacaaaaattagccaggtggtagtggcatgcacctgtaatctcagctactcgagaggctgaggcaggagaatctcttaagcctgggaggcagaggttgtggtgagccgatatcttgccactgcactccagtctgggcgagagagtgggactctgtcccctccccccccccccaaaaaaatgctatggggccttgtgttgatttacttaaagaattataactccctacctacctatttaagggtttggtttctaggcaaccagacgatgttaggtggcactgctcatgagcagaccctgtgtttcctgaggccactaatccagtcctgctgtcattctgagttctaaaagattaaagtttaataaaatagcaaaatacgagctaaaagatatgtgagcctaagtaaattacattaaaaagtgattgcactatagattatgcaacttttatggaatatgtatgtttctaaaatactgtaggtataaatagaaatgttatagctctaggaggaggtccttatacataaaatcatatgataagtattttctttctgttaaatactgtattagtctgttctcccgctgctatgaagaaatacttgagactgggcaatttataaaggaaagaggtttaactgactcacagttctgcctggctgaggaggcctcaggaaatttacgatcatggcagaagccacctcttcacagggtggcaggagagagaatcagtgcccagtaaagggggaagcctcttataaaaccatcagatctcatgagaactaactcactatcatgagaacaggatgggtgaaaccgcctccatgattcaattatctccacctggtctctcccatgacacatggggattacgggaactacaattcaagacgaaatttggttggggacacagccaaaccatatcaaatgctaagcctttgattttaatttttaaagtctctcttttggcattcctggttttcataaagtcaggtataattttatgaataagtatatggacatagcccttattttatggaaaaatttattataagtttcttttttataagctgccctaagagagtcataatataattttgtttacaggtagttttaaagaaacatacttaatataataaataaaaagtatatgtaggtattcagagaacaccttgaaatatatctgcatgtgagtcaggtacatctagatatagaaatataaatattttatataaaagccatttaataatgtttagtttttcaaagttgcttctagtcttactcccaattttagcttattcctgttttgggcaaggttagatttgtttatctttagcattttagtcccatctaatcaagtagtgattcaatgtctgttttttgctttatttaccgaggagcataggtaaataataaagaatagtgattcactctcaggacttttaatgaggaaaccatctccttctgttcatggctgcattaaaaaataaaccaacaaaaggccacatacccatttactaaaggtcttggctgtttattggcatgccatctattgggaacctaatggaatctggacacatttttgttaaaatagagtaattcttttaataaattgaaataattgtttaatgtttactggtaagataccactacaaattagccacaggttttaaataaatgttggtttttcctgtctcctaatttgcccttttgaatatagattggttattacggaaatgaagacatattttatcccagggtgataatgtgaattaggaatatgaaggattcctcagtatttctcatatttcttttcaatacttcttaaggttgtaaagtgcaaagtagggaggccgtcgtggtggctattgtgcttaagagagacagatgctgtgagtgtgtatatttccagcatgctataagagtcttcatagtcctcattctgagttctctgccagctggctgttcagcccatccttcatgacctccagtcatgtggaactcattacttttctgtcagtccattttcctgcagttcctttgaatgttatcacattgtgctgagatcctgccttcttaaaatgtttaccatttcaaccccatttcatacctctagagctatttaaaatttaaaattaaatattctttcacaagaatgtagaacttttgggccgggcgcggtggctcacgcctgtaatcccagcactttgggaggctgaggtgggcagatcacctgaggtcaggggttcaagaccagcctgaccaacgtggagaaaccctgtctctactaaaaatacaaaattagctgggcgtggtggcacatgcctgtaatcccagctactcagaaggctgacgcaggaaaatcacttgaacgagggaggcagaggttctggtgagctgagatcgcaccattgcactccagcttgggcaagtagagcgaaactctgtctcaaaaaaaaaaaaaaaaaaaaaaaaaaaaaaaaaaaaaagaatgtagtccttttgtgtagtccttttgatatttgaagaaaatttctccgttcttcctccaaacatatacttacatctcctgttgtccaggcaatgtagcctcagttgcttgattcattcttatggcatagagctgaggcccttcattatccccacgaactattctgtcactaaaagtcgtgttttatgcttgtaaatagttttatattccataaaaccttttgaatatattatttaatttctatattagaatgagcaccttgttctcacttcagggtctttaaagtcatagttccctctacttagaacactttcccccagccctctcatggctggctccttctccttcaggtctcagctcaaatgttaccttctcaaggaagccacttttcatccctgtgtctattacagctagccactgcctctgcttccctctgccatagactttctttattacattaacctgctttattgtttttatggtattgccactctctgaattatcttacttccttgtttatgtctgtatttagcaatttaaatacataagtcaagggaaaattaagtcagagacctagtctgtctaggccatcactatccctagtctggcacacagtaaatgttgacacttctggggcccagaattgagctatgttttccttgataattctttctatatttgttcccagttttaaattttttttagcattttcataaaatgttaatctttgtactttagaaaaatatatttgcacaaaagcaataaacaaaatcctctacctatttttttttttttataatgggatggggatgtggatcttatgtttaatgaattaccagtagtctgcagaagcaagactatgctagaaatttacaaaatgaggcaaagcaattttctggggtctggtctcctggcagaggtcctcaaactttagtatgtaaaatgaatatttgggaaaggatttaaaatgtagatttcccggctccaacttctgaaattttgattcagtgggtctggggtatcctctttgaacatttaataagtataaatgctcattctgttgttcaaggtcctgggaccgcacctccagaaactgcaaaaatgattgtatgttatcctgttataggtcacttgagtgaatgctaatcctatactttttgtaatcatttattttaggatttccatgctgactcaaacttacataaactgagaaaagcaaaaatcaaagatcttgccctgagatgtgatacccgcctgttttggcttattcaaagatttgactttcagtgtttttatttgatatgcttatgattacagtttaaagctgaataatttaactcaagacctgagaatcaatattgtcaaaactgaccttatatagcaaaatcttggcctgttgggtggagattttctcaaatctgtatatcacgatctcttcattaaccttctgttaaaataagataaaacatttcaatagcaagtttattaatagtttatttatggaggtgattctataacattatcctggatgcactgtagcttttcatagcctgctgcaatgaatcatgtattatactattcacttattgtttggcaaggagtgagtatgggagaatggtgtgttttatagataatagtggcgtttgttttttaatcaagaatttctaacataaagaatacattctttcacatttgttgagtgcccatgaaaaaagccctgtgctttgtatgggaataatgcagagctaactgaggaggttcctactcttaagaagtgcgtaatcagattatctaattaggactgagtgttcactgtgcaccagaggtttttatgtatattgtctcagttattcctcatggtggttatggtctcattttactggggaggaagaacatttattaaatcacattatcactgtaaggcagggtttctcagcctcagcactcctgagatatggggctggataattctttgttgtgggggctgtactgtgcattgcaagatatatagcagcctccctggcctcatccaactacaaagcagcagcacccctaagttgtgacagctgaaaatgtctccagtttttcctgtgtcttctgtgggggtaaaaccactgctctaaaaatcacacagaatggcaaaactcttaacattgaggtgcaagtggggatggtgagagtgtagactatttaggaattaatgctgtccaggcagagtggggacctgaatgggcacaagatgtgggtttggaaaaagcttagaggctttggcatttccactgtatctgggagtgtaattgagcatttttataagtggaaagagtataatgaaaaggactttggagcaggactgcctgagctggattcctagtctggttttgctctgttccagtcatgtgaagataatcaacttaccctgtgagcctggatttctttatcttttattaatagtacagattagagctgttaatgaaaactcaagtataaaacattaatatgtggaagcattcagctcagtgcctgacacatagtaggcactcaataaccttttcctcttcccaaacacatgtgccagttcttcccatggtcttgctttcatagaacattttatgacctaaaagaaacattcatagaggaatgaagttagaaacacatgtctttgtgctccacattctacatttgatttattggtttttatgtatgcttagaatggcattatttgtattaaatattaggatggtgcaaaaataattgtggtttttgccattaaaagtaatggcaaaaacgacaatacttttgcaccaacctaataccagtattacttttaatggcaaaaacagcagtaacttttgtgccaacctaatacaattcttacattgtatttggtgatataattgccacttggatattatatttggtctttagtgcttaaaaaagccaatgtctcaataatgtgtaaagagaagataggttaatagaggaaacaggaatcagttgcagcactgtggaactttggtggggtgaaaatggtttctgaataattttatatttcacaagttttggaggagaagcaacagtatttcttcttcaggtagcataaggtctcaggagagagtctttattgtgagattagtgaaggggtgtggagcagcaagaacctcatttagatattgaggacccgttgtatggttttggttctacccttaacttgccttagctttgagcttgccatagatctatttggaacttcagttgttctcatctgtaaaattagaatataaagaaacagttttcatgatataacccatgaagctatcgtgaggttgaaatcaattaatgactatgaaagtattttgttaaatataaattcctatgtacatgtaaggtttgattactgctattgtcatttattacaataggaggtggcagattcctgttatcttggggtctggggaagtttattcctatgttgttatttctcttcttcatcctcaggctttattatctgttcttaaagtgtagttttgctagaattaaaggtaacaattttacttccattctccaataagtaggagaatcattcacctttgaaatatgttggcttgatgaatttttcatcctcatagatccccaagttgtttgcatctaatttgtctgaagaccatgccaccttgtgctatgatctgttgagtataatgaattagatggttgtcatgtgaacatggagggaagaccttcgtgggtgcctgtgtgctagatgccatatgggtgggtcgattgctctactaggtagttgaacctgtagagttgctaccaaaacttgatacagggactgtgtgggatttcttattgctactagtggttcgcagccttcactttttatagaaatcatctggataattttgcaaaactatagataattgggcctttctttaaaaatttgattttggtttgtctgatgttgggctggggaaggttttattccagaccttcccagatgcttgcaatgcacagccaggatagagagctgctgggctgaggctgtctgtagtgtaagtgctcttttgggtatctttgtctttggagatgagtctaccccttttagctctatcttggggttttgtttacctttgtttatttattcagtgtcagccttcataagtatctaacaactgcctggcattgccatcagggcatggtttatagataaacatgtggcatggtccttgccctccaagggtttgaagtctctgggtggagagacatgaaaatagatcacttcaatgttgtattccatgcaccacagcaagagtatacagagcagagccaaatctgtgggggctgtgggaagaccaggaaagccttcatataaaggtgactcttgagtggagtcttaaaagatgaatagatgtatgtggaaggggaattaagtaggtactctagggagaggtagtgttaccaaaggcttgactgcttttgatggcctgggccagggtcaataacctgaggtgaagtagggctgggaagcctttaagacagacatggacagatggctcttctggccttgagtcttggccttgagactcattagctgtgtgagcttaagcaagtcatttagcttttctgggccttggtttcatgtataacgaagaggtctggctagagggtctccagagttccttctagatatgacatcctttaattctaagtagagcactagtctggataacctccacaagttgcttccatgaatccacttacagcctgtgcttttccaactgcaaaactgttacagcaatactctaaaccattagcaaaatgatttatacggaatgcctaacattattaaggtacccatgtggcctggtggcattgcttggtgtagttgatgtgttgaaggatgtagacacatgcacattttataccattctctcattaattcagagccgcaaggttttagcaggttctcactgcctcagtgaatgatgatacaaaatttctaatagtgatgaaaagaggatgagattttctgttagggatggacatggattggcactcgtgtgctcaattttgatttgaagtatttagaatgctttagtccaaaatactttcattccacctcatattgtatcaatgagttgccaaataacttgatgcacaaccccctcatgacttgtagtttttagatctcataacacccttaatgacttcgtgattataaggcactttcaagtaattaaaccatcaatagttactattctgggttatttgtaacctgtaaaatgaaaccccgccaggattacaggcacagaatttagggctcttcacggtttttaactattttgtacatgggaaacatttgagactctttaataaaaagaataaccaattaactgtggtattgagattgtatttcttatctctgtagtttaaccttaagtataatttcattaaatctgcttggatattttgcatatgcaaaaagaaatatctgctgttcggcaagcaaatatatgcttactactacataggagcgttgttggtggtgagggtctagaatggggtcattacaacctctgctgctgggtgcagtggcctctgatattgcttcggatcttggtcctgttgctcactttgcaaggagaagcacagaactactgtgtccattttgttcctctctacaacaaaggcagacaagtgtagcagctggttacacaatttttctagataaattacaaaatgtctgttacaacaatcatgataataataaccatatcatctttgtggacagcagggaagagttaggaactccatatgtgaagaactcagtctcctttaaggagaaggtgacttcttgttttagaaaacttgcccgttactgtttaacatcttcgagttgatacttcgagtatggcttgagaaattcagttttgatctgtgcatcacattcagggaggtggtatgaggctcctagctgaatttatcttactggaaatctttttagtggtacctctttctcttatcgtagaacgtacatacagtaattacccccttagccattttaagtgagcatacaattcagcagcattaagtacattcacattgttgtgcaaccttcaccactacccatctccagaactttttcatcatcctcaactgaaaccctgaaccagttaaatattaactccccataccctactatccctcactccaccccatgccctgatctctgtttaaaaaaatactgttagtaaacttaaaacttaattatagaggtggtggtttcctgggtcatgtcctgcaacactggatctgcaacaagcttgaaatgggtctgcatgtctgtctgtccttacgttggcgttcctccaaggtacctcaccaacagcccactttattatctgcaggtgactgaccgccccacaactgcagggctgcatcttgttctaggaagctgaaaccagctgaagcccttgatttttctaccctgtttatatctaaataaaacgatccttctcaggtagaagtccacaaaaaatacgcaagcattttgtatgaatcctaaaagaatattgtgtatgttttctgatatggtttggctgtctccctacccaaatctcaccttgaattgtaataatccccggtcaagggtggggccaggtgtagatgattgaatcctgggggcagtttccctcatactgttctcgtgtagtgaataactctcaagagacctgatggttttataaaggggagttgccctacacaagcattcttgtctgcaccatgtaagatgtgacttcgctcctcattcacttccggccatgactgtgaggcttccccggccatgtggaactgtgagtcaattaaacctctttcctttataaattactcagtctcaggtatgtctttattagcagtgcaaaaacagactaatacattttctatattaaaatgtctgggctgtggttatttttattacaattttacaaatgagatttctctttaccttaaatgtatcaactattttttaaagcagcaaaacatttttcccccacaggaaactccagtatttgacacaatagcaggatgttctgggaggatagttaggatctacctcatggagccgtccctttgccgacacaacactccccgatgcacctctacctccctccacagagtagccccacacttggagctccagggagcacagttctacatccccagtcacaggttcctatgacatgacctctgcctccccctccagcctcatctacggcccatcctgattcccactgtgtccatctatggtagcacattgcggggcattcgtgcacactgcacacggtgtctgtttatccgtgctgtgcccttcctcaccccctgttggctagcaaccatactatatccttaacacttggttcaggcagcacctgcccaatggggtttgatggttttccctgcctcttctctccgtactctgacctgtttgtaatcctctgtctggctgtctcctattccaaactgagtcagggacattaccttactgtttctctagtaccaatacagagtaggtagttataaatatgtaccaaaaaaaaaaaaaaaaaagtacagaggctgaggcagatggatcacctgaggtcaggagtttgagaccagcctggccaaaatggcaaaaccccgtctctgctaaaaatacaaaaactagctgagtgtggtggtctgggcctgtaatcccagctactcgggaggctgaggcagaagaatcacttgaacctgggagatggaggttgcaatgagctgagatcatgccactgcacactccagcctgggccacaaagggagactccatctcaaaaaaaaaaaaaaattctgctgagtttggaatgccctaactcagtgagatatgtttaggtttgcttcatctcaactgtttgagtatataaattaaggagactgacacaaaatataatatttagtagccaacagcagtttgatacctgataagtaaaaacagtgtccgcctaccatctaatatgacagaagagaataggacaaagaaaaaaattgttttcccttctttttaaaactggctttatgattctaaggctgtttttgtggctaagcacaaagaaccacagctcatctgaacttttaaatagcccattgcacacttttgatatcagagatgggtttttggaggttgttttccatcttctaccatgtctttgggactgtagagttaaacgttgacatcactgatatcaatcataaaacataaaacaatggttttgaaaccttcatattcattatttcatttgaccttcacagtaaccccataagttagatagaagaggtatgattaaccttgtcttaaaggagagaaatttaggtctgagagtttataaatgtcttcccttgaagcccccaggtaagtagtagagcatgactcctgatcgagtcgcctaaattatcttacctccactcagaagtttcccaggaggaaatttgtgtataacatctccttaaatgtttggcaaagattggttttgccctgcccttccattgcatgtttagaatattttaagtagattcttgataagtctgaatttatactatagagcagcgatgccatagcctgtttcaatatatagtgcttctcatctttatagcaaaaatactaaaaggtgattcatggcttggtgattactcattgatttcttagtaaatggggacactgtgtttttgtacaacaaacacaattgtgttttcccagaaagataagaagtggattcttttccacctacaaaaaaggaagcggcataccttgggctacttacattttacaatataaaatacatctgtgttgattatttaagggagttggttgcctcgtttctcagaaaggaggaagaaatttctagacttcttaaaaaatcagctccaatagccaggtgcattatgatttttttttccccccagaaaaactctatattcagactggagcttgataaatgtttgttgaaatgaattgaattgatttattcgctcagcttcagttgtgtgattttgtgagcaaatggatgaatcttactgctctggagaccacgcaaatatttgccaggtgtataatttgtacttttcctctattccaagcagggggaaggccagttacctgttacctggtgtggcattgtagcaagttgcttactctttgcttttatatttcctcctttacagggatgcctaggtttgtgtgtttggggttgagggtggggagagacaatgaaatagaggatggaaagaaagaatttctgggtattgtagaggaggatgacctggctacaataccgagatgtaatctcttggataatttgcatgactgcaagttaggaatacctgtgactctctatttccgtttccattaaggatcacattattcacttttttccttacaggttttagttatataacatcagtaacccaggaatgctagagatgcctctatcagatactttcatgacaagttttagccagagttatctcattctttctctttgtcaaaatagtgaaagttagtgaaaacaggacagtgtgtcctcttctttgggtggaggcaaagctgattttatattctcttcaaaagagttgcaaattaggcagattctgatttctccccagctaacacttctggtgatttcagctggagaaaatgaatgttttgtggcctaaatgtttagtacattttgttctaccattttgtacccacttgtgaacttatgaagagacacttcaaatacttcagaacttcaaaacctttccattccctcaagaaacctatcacagaagccaatcaccaaagcctccctcctgctccatatgaatatgcccctctgagagtgcttcagggaggaggtgcctgaagccaagccctctgaggcaaccccagctttcatggtctgctgtaggatggggaaatgggatgagcagatgattaatacggagccatggctgctctgtccttggggttccagtttatctgttgctcagaacaagatttgcttgaataagacgaatgcctacggttaatcagctgagtaaatagtcataaattaagatgtgaccaagaatccagtgttcacaggggatgggggaaaatacaagacagaaaagacaaaaacaaaaaaaagtctgctaacagaacccaaaacagaatagcaacattgaaaacagaacgctctttgagtattgttttctagtctagaagcataggagatttatggctacctgattaagttgatgagtaatactatggtcagatgtgctctttgaaatttggcctaagtactatgcatcatggtgttacctctctctgaaatctatatatttgtgaatagctaaaagtaagataggtattgacaatgttttctttcacagcccaatcactacttaaattatttctccctcagcagtcttaatctacattctcagtgttgaagaaactccttagtctgtgcaacagtctctagggagtatctttgcatttctaacaatcaactctggagattaattgggattatgaggcccatttgctcataatcataagatttcagtgtctgactcaggatcttgtttctcaggaagcccaagggtaaggacacagagaactcctaggctttagtcttgtgtcagccgagtcctgctacaagctgcccttttggccctccgaggtcctggaggttttcttttgaaatttccttgaggaacacggctcaggtagtggaccagctcaggtgctctaatttcagtgtgagtctgtgggcagttgcactcaactacttctccgtggctggtgtctgtttccaaagtaaatacaggggagaaaatcccctttttacaatcagcaatttgggttagagcagaagcagtgaaagtgcctaatgctgaaaattagttttttaaaacaaggatagctatacaaaggtgtgtaaatctacatatatattacatatatataatgaatttggtgtttgtgctgagttctatgctttactgggagtgagtttctaaattgttatcagttcaagaaaatttttttttcttggtagcgcagtgtcaccctaagacatgaatgtggtcttaagggctgattttgctagaataatggcactttatactaacatacaccttttgggggcatttggagggtagaggatatctacaaaaaattctccagaataaacattttaagaaatcatagatattaactctgaagaagtaccaggaccacaatcattactgcctactattactaagagaagaaaaaataagttaactttttaactcagcttggatgaaggctgggcatccaaaataaaaactttgatttgtaggcaaaacacccatgtggaaggtcacattgcagaagaatattgctgtcttcctagacttgaacctcagaggttaagatgagttcagaactcttgatagtttaagagccatctctttattttttttaatcctgagtcatctcttgtagtcaggtgtttcatagatttagtatgtgctttggttggcagttcttgtctttacttgttaatgtgtctctttaaaagctcaaggaccgaccttgttctgtgcacagtaaaagtagcaatagtatgtaatcccgtatgtatagtatatgtatagagtaactatgcccattataggaaaggctcggtagcaggcttccgcaacatcataaagtaagcacttactgcttagtatccctgctttacagatgaaaagtctaaaccttgcaaaatttaacttaccctaggtcacactgacagtaagtggcacaacctggagttgaacccacaaccttttgacaccagtgattgaaacagatataattcattggcataatgaaagcatggtggggtcgactgctcagtgcaagagttcagtcatctaacctttaatttaaaattttctggtttaactgaagactactatttctagttcttaggatccttgtaaagtagagcagccacctttagtgttgtttacatgctttgtttctcatatctgaccattctaaaaaggtagaaaagaattattctgctcacaaatgacctagtaattctgccaatatgttgaaataaatgttttttaaattatcctatttaggaggagaggtgactttaaggtagaaacccagccaaaatatgttgctattctagaaggttctttggcttgggtcaatcaaataactttgatgttacttttgcatttctgaatacattaaagcctcattagttttcagagaggagacttgggcaaaacttgaccttttaaagtaccttagaaggaggcgtttaccaagcaatttaagagtataaacaggagtttaagaagtttgttgaaagcttctgtccttaagtacccttgggtatcttaagactgtttattcttgttgatatgctaatcacaagtcattcttcagtattaaagcatttcctccaaggaattaatactttcacttaaatagggttcctgcatgtacttggttcattaaactgtactgtaaagtagttccttatttacatagtgataccaacccttgcatcccaaatacactgagttggagaggctttgcagagtattaaacacatttatgtcaaacattcgccattttggaaaatctgaaattatcagttgcttattctttggataaataacacaaaagaacatgtggctaagtcacaaaggggatgcctttaaagttatgtatggaataatggtctccctccatacttggggtgtggtagccttgtggaatccaaaggcttaaaaggtgaatagatttttctgaggattgtctggagtttttaatgccacatgaagatatggaaaattttatggatcaccctggatgagaacccaggatgaacctttcaaaaaatcaaacacttctctttgaagcccaattttgcatttgtgtatgaactagacccttgatactccaggtgtggcctgctgtccagcagcatgatcagcacctcctgggagattgttggaaatgcagaatctcaggcctttccaaacccactgaagcagaatctgctttttaacgagactcccaggtgatttatatgcccatttaactttgggaagcatgagattaggccatctccttggtcctgaggactagagatagcttgattagtggaatgcctttccttggcataaatccagggttcaggatgggcagggtgcctgaaatgcaccatttaacttttgtgttgaatggttctcctgggaactgagagggctcaggcagggcctttttgcccagtgtggttggtttgtcatatcccacagagatgaatcacacatttggataagtgaagaggagaagggagatctcaattctggcagtaaccaggttacatgatgcagagtctgtaatacttaggtggagggtacatgaagatttgcaacatttggctactactatgaattggaaattttcctcccaactcttacaaatgcaatgatagccctgaaactctgtccttcaagatattttggaactttctctggtgctgttatttcatattaaaatgagaaaaagaacaagaacatgagaataaatgaattcttttcctctcaaaaacaacatccaatcaaaatacctaatgaaaaatgaagatgacacataatgcaatttttgtatgaatagttcttttgattaattatatagaagatctaagatgaccttctttcaatggttgagagatctgtcaagtgtttttacagtgataggatagagaatagtcactcagacacacatatacacacctcctatatctgcatgcattcatacacacacacacacacatatatacatatatatatatattttctctatggttgttggggaaagtaaataacatagtttgcatgaagaatacatagggcagcccagccatggtggctcaggcctgtaatcctagcgctttgggaggccgaggtgggtgaattgcctgagctcaggagttcgagaccagcctgagcaacatagtgaaacgtcatctctactaaaaatacaaaaattagccaggtgtagaggcacgtgcctgtagtcccagctacttgggaggctgaggcacgcgaatagcttgaacccaggaagtggaggttaagaaaaaagaatatatgagacagattaaagtgtccagcaagtgttattattatgggaagcagcaggttaaaagcataaagtttggggttgtatcccttgggaccagaatcttggctctaccacttattggtagacctaggcttcattgcttaacctctttgtgctttggttttctcttctgaaatttaggaataatagtacctagctcataaggattaaatgagataatacatgaaatggcatttagaagaattttaggtatacagtgagtactcaaaaaagttagtttttatgtatgcagtatactctgttatctgaaattcagttacaggattgagtttctttgggcatttttttttttttttttttttttagcaacagagctttaaacttgttatatggaaatctttcacttcctcttcctcttaattgcagtagttaattttcctcatgctaattggatttcaacagggagaagaattaacagaaaatatttgaatgtggcattatcagatgtagtcatctaatatcttcaaatgtcatagagagctttttcattctgggtgttgagattagttgtaaagagctctagaaacacctcagaatcctggatcaaacagcctggttcctaatctagattcagattcaacaaatacggattggctaccaggtttgttcttggctaccagctttgttccaggaactgttctggaacaaatacagaggttaagaccataggtttggatctaagcagatctgagttcaaattttgattctgcttattagctgcaatattttgtgtaaatattgtgtaaggacaatggtatagacaatattggcagaggcaaaagaactaattaagaatctcattcaccctcctcaaaaacatttgctataatgttgtattttatgtcttgtttgttctgtaattcttctatatgttcattgaaaaatatatagaatattttcctttgggtagcccatcttctagctccctgggaaagatttcattggccactaaaaacaacttaagatcttgctttgggagtagataagttcattcactcagatttaacaattttaagacatacaaaaaaagccctcgaatactacttttagaagatcctggataccattggctgctgcttattccacaatgaatgtatgctcggtgtaactagaatacgcaagaatggatagctttcaaatattagtggggaaaatatcctttacatcaaaacatgactgaaatggaatggattacaggaatgttggaaatactgggctaaaacattattctgactttccatcatcctgttttgacaggaccctagacaggcagttttggggaaatgtgtcaaatttgtgttgagctagaataaacaatctaattgtgtgacactgcctcttgggaatcaggagtcagcttcttcctcaccctgaagtgattagtttatgccctggagctgtctgacccttgtaaaattatcccagctggtaggactgcagtggctgatctcatttttctgtgaatgtcttattcttgtgggaatctttatcaatcatctgcctctctttgtacaatacaagagttattgtaggattgtttcatgggctagtaaaaggaggtgctttgtaccaaccaacaaatatttcttgctctcttgccagtgtgaaccactaattctgaaaaatatgatatgtgatttaaaatataaataagcactcagaccactatccaaaatttctaattttcccagtagattggtggtggaagttctggtcatgttttactgtttttcttgagagatgaaggtagttgatgatctatatggaaacttttttgggtgttatagctgagagtctgaatcctagtatttctaggattctaggatatcactagttttcagccattcagcaataccaacctctttttttttttccaagttcatcctagaacttgcagtctttttgcttaatatttttcattaaagtattttatttacttaaatttttcaaaaagaaaattcgttgctaccgtaaatgagaaactcaatattttcagctatatttaaaaatatagtacatactttttaaattaaaatatttgcccttgtctcactaaatcatgttggtatttggaccactatactttaagaaataacactttcatttgtgtttgaggcttaccagcatagcagaggagagggactcaaacacaaatgaaagcactacccggtgctgtagtatgactgttgtaggccctccccatttttgcctccgtgggcccctttctccaagaaaaataaaacaacaaaaagttaaaaattaggctttataacctcattggtgtaagacaaatattatatgttaaaacattttctttggcctaagaattagtttttatcttctaattttaaaataagaataattttttgttgactgcaaaaagtactgtaggctctaggtcctgtgctgtctgcatctaatggatacgttcgttggcctgtaaccaccccatcctcttcaagagatctaaaggcttcactcggtggtggtgtggaaaccacaaaaatgaaatgtatttggaatcttctgttatatccttaaaatttagatggattctctttatgccacatgataatcattgttgcgtcagtttaaaattatgttaatgaaattactatagaaaggttgacttaaacaaaatctatggtttcctgctgctgtaatacttggcatagagctgagtgccccagggagtacttgtgctctggtttggaagcacaggcatgaggcatgttaaagtagaaaagcttttctttttttccttttaaacttgtgctcaagagaagaaattgggtttataatggatttacttgttgtcaaaaacaaactatagatatcatcctagcactgtggctaccatgcacagacaaccttaacagtgaataagtaagtccatgcagattctttagaagatggtagaagaatctacacagcactatttggtttcaagctcatttgtaagtcttcttttcttagagcctagtgagtgatttacactctcttagctatttctagcaaagaggaagaacagtcactcttgatgagtgactaaaactgctgcttttacctcctttttaagaagtcacttccctaggtttccttggtattaagagggggatggctttccccttttgtcctctcattactctcttatctaggacaggctattataaaagctttttgtttgtgagatcagttctgatttctaacttccccactcaaaccgaaataccacacttgaagttcccccaaattgctgctgctccgatgactcctgggtattgtacgctaaattcaaggatctttatttaggttctttgctctcttgaaaagaaaatcctaatgagtcacccagtttgctgattgctttgtaggtgtgaccagttaaatgcaatgatagtggagttgaaatagaagaagtcatttgggctagctcatttatcctgaatctaatgtagcctgttggcttctctttacttgtgtgtgtgtgtgtgtgtgtgtgtgtgtgataggcacttctcagctgagggccagctctgcaggcacttaggacttgtataccaggcatctagatgctacttagaactagcttggctgtcaaagagaagagagtgtgctctatgtgtttggtgcctgagctagggttttgtcatttttcttttctttttttttttttttcagcaaatgaaccagtgagtgaagggcattatcacaactccaagaaccaactaggagtcacccatgacatcatctcctgaatttcatcaccaagcccagctgatcctatttcctaaatggttcctgatttctctcttctgttttctgtctctgccaccactgtcctagcacaggcattgcacatctctcatatgaacgcctgcaggactgtcccttgatgttatccttgcagcccctacattcctactgtgcagccagtaaagtcatattaaaatgcttatttgatcatgtctctctcctgtttaaaaccttttgaatgatttcccatgtgatcaagagtaaacttagcctacaaggcccaggatgatctgaacacaaccttcttcttagtgctgttctttctcactctctgggatccagacatactgctttctctttacacagaaaacctaatttgcttcctcctgcctcaagacctttgcacattcctgctcctggaatgttcttctcctgttattaactccatgtcactttctcacaaaactgttcttcatcctccagaagatcccaggccccgtttgggctttcatacccccggcacattctggtggggtgctaaactcagattatagtgatacacattggttgaataatatatttatcagactataagctccatgaggccagagacttgtctactttgcttaccacagtattcccagtaactagcacagacctaccaaagactggctgctcaataatttaaagaataagtagagtgcagtgcaaggatgacatgcgcaaggtgtatatgaataaataaggaatcatacttacatatccaagtcatcagaaaatgtttaattatggaccatatctttaatagggcacaaggttacataatacagcttcagtgatttttcttcaaaaatcataaaatcagtgtagagacttgaaggcatttatctacagtgactcaattctgcatagattgttaagcttttagagtaattaatgatcaaccacgccaagcagagtctgactgcagtgcccttcttcctgctgtttcatctgcctgtgatcctcttctccagacacctctgttgcttgttccttcactttctccaggtctctactcaaatgtcattttattagagaggccttccctgaccaccttatagaaaataacaccccaccctctccattccctgttccccttaccatgtttaatttttttcccgtagcattcatcaccatctaccatccatccatccattcatcattcattcattcatttgttcacttcagtctcttttcactagactgtgccttgtagataaataaggattctgtttttgttgagtactccatccttagcacctaaaacaatgttaaaacaactagatgatactaaaagcatattttttgaatgcatgaatgatcataatgaagaaaagcttactattttatccccttgcaactaaggaataaggaaggggaaaaaaagtccattttcaccttttgacctcttcttgcccttcaccaaaaactgagttccctggtgttttttctctcatatgctgatgtggtgcaaatagcctaggcttgagggtgagggtgaaggtcgagttcccaccctatgattgtatgctccattgcagctcttgacagtctattagaaatccataaccatagatacttctgcttctagggctttctttgtgagcctaagatttaactaccaacacctatgttgtcatgtggcaaaagtaaagaaaaaaaaaaaactcggtgttttcacctaaaaataacagcttgctctttgtcaagtggcagcctattgcctgctcttgcattgagtccttctccaggcaagatgtaatataacaaaggaagagactggtggtcacaagccaggacattgcagggctcattaattacttggaaaatggtgcctgggctgcagccagaatcccaaacaaaaaaggaaatagctcctgttctctaattgacaagttgatgagtgaggtaagaatgaaaatcatttcagtaagtaaaagggggaagaaatcaaatggaagcagtagttgtgttgaagaacaagtatacaattaagacatattcccaaccctgagagggttgattcacatcagttgagaccatagatgtcactgtgtgctctaggccatgagacgaattcattatctcttataaaggatagggaacatcaatttagggtaagtgttgatagtgttggagcctgggccaaagtagatgatatatatatacaaatgagttattaatctcggcagctcctaaatcatttagtccttatgagaactgtgttgcaaatataaagagagttaaatattctcactccagaaaataggatctataattttggcaaggctaaaaattcaaagccatcttagtgaatttgttgtaattaaatggggatcgtttcaagcaggaggagtcagttaagaaaaacgagaatttcgtaatgttgtaaaaagaggtaatttaagaaaagtacacttagtgggttaaacactgttccatcttggtgtgattatattttggagcaatgtttatagaacttagcctgtcactttcacaattctgagctgtgcaaaataggaaggtccggtcacctaatacttagcagaaataaggtcatcagtacctttcttgtgtgatattaatacagctttccaaatttgaatgaccataacatatctgtcccataaaaacactgcattaggagaaaaaggaaaatgaaaacacacacaccccactgctactaccatcacccctactatcacctcagaacccctacaaagaagcaagactttcttgtggttgttcaatagcctataaaaaatgtaaagaatatttatttatggaaagagacagctttggagtttgcaagcaatctcaaggtcaaatcttgtcctttgggaagaggtaaccagaattgcccactgagggtcagatgtttgtaactcccagaaatgtgaacgtaaaatgaatactaaagctgtgctgcaatcatataaagagaaatgcaaacaggggcaagatatgggatggggtttaaaggaaaattatttggttttttgcttttttggggaggcatagaaaagatgagaaataaatgaaactttctaggaagagacagaatttaagaactaagttgagcaatgggaaggagggaggaaacacattcagtttgaaatgttgatttctgctcagactagactgtcgaaggcttggtttgtaaattggttgagcagagtcatatgaggaaggaactcccccttttgttttactgaaacaagtgagtgaggcatctaaactcatttatgccttttgggtaaaccaccaaacacctctttaataataacctacttggttgtgatgatacattgatttggagataaatcaaaagaatcattggagaagaaagactagaattctccattaggatatataactctagaggcactttgagaggcaggaaaatatgagatgtggtataaataatctctgcctggaaaccatgcagcaggcttagtctcaatgcccattcacctagaggttgactccagagaatctgcagaacagcataagtgaacaaaggttctgtttcaaagaattgcaagcaggtgctgtggcagtcattgatactgttcaaatagttctgtactccctccatcctgggcacatttaattactggtgccagatccttcaggcttctctttccccagtgaaggtgaccaacaacctgagagatggtggctgctcagggagccttggtgttttgttttggaattataagtaagattgatgctttattgagatttctctagtttagtctcattttattgggatttcactagtttagtctcattttcattacatcatattgaagtaacatactatcaaaatgagttatccctgttgaggctgatgcagcagtgactgtcaggtttctctactgtaaacggctcacccctctccatgctgtattctttggcaggtccctatgtgcagcccacagctaagaagtggggagttagactctaccttgagggttgtattagtccatttcaacattgctatgaagatatatccaagatgggtaacttataaagaaaaagaggtttaatcgactcacacttccatgtggctggggagggcctcattattatggtggaaggcaaaggaggagcaaaggcatgtcttacatggtggcaggcaagagagcaggtgcaggggaactgtcctttataaaaccatcagatctcatgagacttactcactattacaagaacagcatgggaaaaaccaacacccatgattcagttacctcccactgggtcccccatgacatgaggggattagggagctacaattcaatatgagatttgggtggggacacagccaaaccatatcaaggatagagtaactgcatacattatttgaattcttctgcataggagatttgtcttttctgccccatttattcattcatttattcatatcaatatagattcatgtgtattttattttgtacattgggttatattctaatacaaccttatgtattttgttgctcaaatttttccagctttggccattggaaactctcagttgtctgctgtgcccctttgccacagagacacctccctctttttttgtttttttgttttttgaaaggaatcctcattttctggtaccataaggtgcttgagagtgatgatttctgagtgattgcaacaagcaaagcctttctgccagcctgtggagaacacgtattcctactgagtaaacaaaactctgttgagccactgagactcaggttgtttcacaatttaatctagaccagtggttctcaaaatatgttcctgggaccaccaacatcagcatctgctgggaacttgttagatatacaaattatctggtcccactttagacctgaagaattggagactgtgggattgggacccagctgtttgtgggtaacaaaccctccaggtaattcccatgcacactaaagtttgacagctttaaaagctttatagtttcagatctagtcttcgtaatttatatgagtaacataaagaggccaaactcaatggatcttttggttatatttaaattattatatgttgttccacagcaaaacattaacaaagttactttaaaccaagatggttggttttcttcataataaaaatgtaaaacatcttgaaaatacatggatatgaaggaatattactttgggatggggtatagggcttgctgtacactgggtccatttttgcaaacttctagcaatagctctgccaacttcaggagatctctgttgggatcaaataagatggtggattcaacagtgcttggtgagctggaatgaacgtatggattatttttgagttaagcctctctcctattagactgtaactgccataaggataaagactaggctactaccactgcgtagaccagtgcctgatacagggtatgtgtttagtgaatgtttgtaaaatgatcacgttattttttgggcttttgtttccgcataatgccttgggctttctgccacatctgcacagcacttgtactattattctcttacttaaaaaacaaaaaacaaaaagctgagatgaaatttacatacagcaaaatatatggcttttttttttttttttttttttttttttttttttttttttttttttttgagacagagtctcgctctgtcggccaggctggagtgcagtggtgcaatcttggctcactacaacctctgcctcctgggttcaagcgattctcctgcctcagcctcccaaatagctacgattacagcctgtgccaccagacctggctaatttttgtatttttagtagagaaggggtttcaccatgttagccagtctggtctcgaactcctgacctaaagtgatccacctgcctcggcctcccaaagtgctgggattataggcatgagtcactgtgcccggcccaaaatatgtgattcttaagtgtacattgtagtggatttgatacaggtacttgtactatactaacaaaatagatttatttaaattgactctttttgtcccatttacaactgcattaatagccataagctcatggttttgtagtctgttatatattttccaatgaatattaaaatcagtaacccctagctacctctccaatagctctcttcttccatcctttcagaattttgttcttggaggagaacagcttacttatttccaaatttgtaggctttttttttttccctcccaaataccaagagtcctcaggtcattgtgttgaaacagacagaggagtgacttttggaccacagaagagtttgagagattgtttcaattggactgcctgttttcttgtttttctgttttccaggacaactttggaagaagctgactgctttgaaatcaattcggtacacttcaaaaattaacttgctccataggcatttgtggtacaccagttaaacacagagttctgtgttaggcactaaaagaatatccttagaaagctagctgataggtagccttgtgggagaaaggagtaaagtccacgagtaagtataatcaacaaggcacgatgcagggcacttcagaagacttgagttgtgtgccatgggatcaggcagtaccctacttcagtctgtagatttgttcactaacttgaaatgggagtaaattaaaattcaaactgcactcatcctgtttatgtattcggtttactgataatcacaggttagtaattcagatctcaatggctgagatgtttgggctaagtattgtcaagggattgtcatatctgctttagaactggtttacaatactacactcattttatttacattacaaaagtaatgaatgcttattgtggaaatgtagaaatatgtagaaaaatgaaaatgaaaatccttaatcactcatagtccaactgcctagagactattgctggcctttttgttaaaaatacattttcccatggttaggatcatacttcatgtaaagtattgtaactttaaaaatattagcatttttttcatgtcatcaaatattctttataatattttaatggtagaatcgaagtagattgtatgtatctactgtcctttacatgacagttttatcatgcattccaatttcttgctgttatatctttgaacataaatctctatgaatttttcataatttgtgtatataattatatggacactatttctagatataactaggctcaaaccaattaacacagcctaataaggcagaggcagactgggaggggctggaaaccggcccatgagctggtgtatgccaacaaacacaccttgcaggtgctgccagaaggcctcgtctggcagccaaggcacacaatctgaaaattacagcaacagaccggattctggtagcacttggcatcaggacatccagagagcttgtggagtttcccaagaagtctgcttagatgtcttaagactgagaaaagagggaggaagtctagtgagaagcagcctggccatcagccagcctgggattcagctgaaggacctcggtctgttcaacccacaagcattgaggggctactgtgtaccagcactgtgctgggagcttgggatacttccacaaacagacgcagatctctgccttcatggaatgcatattctaatgacgaaaagcttccatggatggggactgacaaaagcgaagtggcattctggttctagaggaactggatattgagtatattcaagatagactcaggtaaagggaacaaggcagaggccagtgatcagcactggcttctctaatgaactgagctgaatatcagagtggacacatggctagagccacactcatggcaaggatgacttatcaagtctcagagtagagcctacaagtgcatctttctggcctaaggccatattagtccaaacagtgaagatttgcctcagcccacacatggcaggttcagggctgacacctgaatttttacacctggttgtaggagatgggaggtaacttagtgccaatgagtgaaatggagaaaacagaaatgtgtatttagccctctgactagcatgtattatattaggttgttaataaaggtttgttaaagggatgcatgaatttaggagaaaagaaagacgaacatcatggggaaggcatgggagacagaaaataatactaattgatgtagcatagtcattatgagcttgggcagagtcagacagtcctagattcaaacgttagctcttccattctctgtcttcagtttcctcacctgtaaattgggctaataatagtaccttctgcactgtacggtagttaggcaattcctataaagagataagcacacttagggccgggcatggtggttgatacctgtaatcccggcactttgggaggccaaggcaagtgaattccctggggtcaggagtttgagacccttgggcaacatgatgaaatcctgtctctactaaaaatacaaaaaaaaaaaaaaaaacaacttagctgagcatggtggtacatgcctgtagtcccagtgacttgggaggctgaggcacgagaatcacttgaacctaggaagcagaggttgcagtgagctgagatcatgccactgtactccagcctgggcaatagagcgagacattgtctccaacagaaaaaataataaaaaagagttaagcacatttcttggcacacatagtaagcattcaataaattttagctaataaaagtaatgtttaatgtttggcttttgggggatattaacatattacacattctctggtgaggttcagctttcttaacgtcatgaacctagaaaactgggaaaaattactttcataaggatggtgggatttcatatatacacacacccctatacatgtcacttttgttgttgttgttactgaaatgagggcttctccagtttagaaatgaggcaatgaagagtggaaggattaacataaataatcttaaaaaaattgttggttgattggaaatcaaagacttggagtggggagccataagaggaagatatcttcccgcaatccacattaccattataattaccgaaatataggtccacgtagaagagcctggtaaaattaagagattcaaaggtacgtagtttcgattaagctgctaaatagcttcattcttcaatcgtggttagaacagcttctctcccttctgcttatgctaggatggtataagacaaaaagatctagagctagggttctctatcagtttcctattttgtttgggcttctgctcattggagcactatttatcctgagggcatttgtagttctccctctgggcaaagtctagaaatcttttctgcctcctgaaaatctgttgcttgcatggtaatcttgagaaaatatttctagaagtgaatgaaatggccaggcacttcatttaagcagattatcttctaccttctttgactatggaactcaggcctggataaatattctattaggaaaggtgtgatcacagaagatccagtcagcaggtaagaagtatatgtaatacacatctatcgttatggataaggaacagtaagtgggaataagggagcagaagtttcatggaaagtcttgctgaccaacctcaagaatgaaatatggcattgtaactatatccgcccaaataggatgcccaggcttaaaccgtatttacatgcaaaggcgtcccacagtgcccagtattactgtttctttattcaacgtttggacctcatgtcccttcctcatctttgcttatctgaggtcttttgctttctccctgttcaaaacctgctttccgttcctcttgcgacttcctctgtccaggaagcacagactatcactccattctcacttggaggctcttaccttctctccttccagctaaggggtattcgtgtctttgtttttcttcataggaacttcctgcctggcatgagattgccatggatgcctggtggccaggcttgcctttgagctgtgataatgctgatctcctggagtcctgttagtgcacagcacacttttacgttctctttcatgtttggttggcacaaagtgctctggggtgggcagtaggtacttcattatcctcattttatagtcatgaaactggcttagagaggtgaggctgtggggaagaggtgaagctgtgtcagaatccagaggcttccacagggaaaggagctcttgtgtttctcatccccactaggattccagggagcatgaagctccctgccaaagggctgtgctgttaaaatgaacaaaaaggaaagttgaggtcttactttagagcactgcattagagcagtaaccctacttctacctcactttgctgaccttaaacatgatatttatttggtatcacaattggaactggaaaaactggccccttcagggatctatcactgttggttggtaagtacccacaaaactttctagtgcacctggaaatgctgatggagatttttctcactgatcccaaggacacttattaatggactttgcctacctctcaagcagagccatgatctggaaataagccataaaatgtatgtcatcaggtccctccgaggggactatggtctttgttcttagactgttaggcctttcctcagagctgtttatgcttatttttaaaaaattgtcacagaagcttgacttatgtggtcatacagcaggttacagtggcacagagataacagcatatagtagaccctgagagagaggagggagacaaaaacactgaaaatgaaacacagacctaatttttaaaagaaaggcacacagtcaactgataggaggttaagagtgtgctcagttgttacagcacagtatcaaggatatttggaacaaaaggccttaagttagtgtgaaaatggttaactttaaggagtaaaggaagtgtgtaattcatcttaggaaatttgccgtggaaaatggaggaaaacaaaaacccattttgttagttttgacaaggttattaacggatatcagtcaaaatatgttggagaaatttaaatgagtaatgtagattttatttccattactagatactcagttcaccaaagaagctatctgattggcctgtaaaggggctgtatgaatatgtaaagatacttaacatcggtcatcaggcaaatgcaaattaaaattgcaacgagatacactacgcactgtatgactaaagttaaaaagactgacaatatcaattgttgccaatgttatgaagcaaccggaactttcataccttgctgataggaatgtaaaatgatacattctaaagtgccactttagaaagcactttcatagtttcttatggttatttatacacctaccagatgacctggcaaatctacttgcaggtatttacccaggagaaataaaacacacgccagtaccaagatctgtattgaatggtcataggagctttagtcataatagccaaaagtgggaaatgatctacatacttatcaaatggaaaatggaaaaacaaatcttgccacatccatatagcagaatacgactaaacaataaaaatgaatgagctactgatacatgcaacagcatgaatgaatcccaaaattgttatgctaagtgaaagaagccagcctcaaaaggctgtgtactgtgatcccattaatatcacatttcagaaaaggcaaaactatagggatggagaacagatcaatgaactaggattatggggaggtgatgtgactacaaaggggcatgagagaactttttaggattaattgtggtggttatgtgactgtatacatttgttaaaattcatcaaactgtacatttaagatgggtgaattttaacatagattatacctcaacaagaaaaaacaaaatttggaaattgcattactaaattaataaacaacctatgcattttcttttatttgtccagcctttcaacaaaattttcttgcacgcaaacagtctaccaggcactgtgcttatccctggggatagaaatatgaataaaatgagatccttgccctgatcacttttagttccagacccttttgcattaaaaagattctccaagctaatagaaggttgctagtgattggttttcaggaggagacaattttttttttttttttttggcagttggggaaggaagggtgcattgtttatttgtatctctgaagactctgaaagtcacttcaaatgacagtgatctgttgtaagcgctagtagaataatagattctgtcatcaaagggattggcacagtttatggtaaaaaaaaaaaaaagaaacttataaagatcaactatacaggattcaagtttttaaatttaatacaagctaccttcctttcatactctgcttttccctaaggaaattactggagtgtttgaagcccagaaacttgctgtagtccctagaaacaatgtggtgatgtcagacttgggtgaataaacagtagcacctgttcaagacttcatgagtcttttttctccccctctagtcttttttggcacagcctgaggttagttaatctttaaaagaaggaaaacggaatgagccagaaggtagcttgattctagactatttttagaaggctcctccatgctgctcctgagtgccaggtttttgagagcctggcagggcaagccattgctggatgccctaatgtggccatgaatcagctctaggtcctcgcaggtctctgatggccaccagtcctcccggaagatgctttctgtgctgccctctcttctctgtcattctcctccatctcccaggcatcttttccaacattctgttccactcactccatatcctcaggaaggcgccttccagtttctacggtcacagtgcagaggattgtgtatgtgtgtgtgaacagagaggagagagcgagagagagcaagggcaaacaggcaggctacttgggtgattttcctaaaagccaaatctcacattattcttccagttcttaaaacccttctttccattttaatttgttctaggacaagcaccctggtgtctggtgcacagtcattgtgatcagccccacccactgtccagtgctgtacttgacacttcccacccctcagtcagatacttttgttggtgggaggtggtttaggaggggtgatgataacagtggtgggagagctggtgaagaaacaaggcactggtacttgaagacttgctctcagctcctggaacaggctcctgggttgtccagtgtggttggccagggaaggaaaggaaatgatgattaaaagacaaatacgcagttggagaaaaaaactgcctttggcgggaggcgctccctgtgctgtatctgtcgagtaactgagtgctgagcacgatggggaaagggaaaggttactatctggggccttgctaaaatctttgaaagaccttgtagtaggataggggttgcaaactgatggccagagggccaggcatgtaattctcatgagtgaaatggccagtttgctcagcccaaaggggacagccactcctcattttccaattattgccgtgggaatggggatccagtgttgtaggttttttttttttttttttttctttctttttgagacatctgagtctctgtttcgcccaggttggagtgcagtggtgcgatcttggctcgctgcaacctctgcctccctgcaacctctgcctcccaggttcaagcgattcttctgcctcagcctcctgagtagctgggattacaggtggctgccaccacgtccggctaatttttgtactttttagtagagacggggtttcatcatgttggccaggctggtcttgaactcctaacctcaggtgatctgcccacctcagcctaccaaagtgctgggattataggtgtgaaccactgcgcccggcctgttgtcagatcttagattcttcttcttttttttagaaaagctagactttatgtaaaagttccaaaatattcatatttaaaattaaaaagagacacacacacacactccctcccacccccaacaccaactattaggatcaaacaaaatattttcaagcagaatatagttcgaaggccatcaactggggcctcttccctaagagttgtggctgtaacatcaaagaacatcactgtgcttttggcatttggggcaaaataatttttctttttgtggcactcactgtatatcacagatttctagcatttccaccccctagtcccatccaatattgcttttctgtcgttctgacaaaaatgtccccaaattttcaagtaacttatagggtcagctgaggttttcccagttttagtatagataatacccaagcatctttgtgtttcctttgctgggaataatctccggccaaatataacacttcagttcttggtaaaagctaaatttcacatcattcttttatgtgtctagcctttcttatcctcagtcacccttcctctgatttctgtgggttttgtttgggtgaatgcacctggccttcaggttatagctgaatcaggaggtagttggctggcagaaggattacctggagacagttacacatctcacacctttctctggctatagcagccctgactcaacagcagatattctgtcctgaggttcttcccaggaagtgccgtggtgtgtgaagctggcagcgttccggccattttggaaggttgtcataaatggtggcactgcgagctgaggttgggtgatgcatgctctttaagaaaaggctaattttctggaaagaagtttggctatgcctaaaaatgttcatccatctctgaggaaataatgagaaatatgaaaaggctttatgcacaattatattgtttgtaaaactaattccaatagccaaaaacagtaaacaagttaaatgttccacgtaggaaaatgattaaacaaattttgggctagctatatgatgtaatgataagtggccttttaaaacaaagtttatgaagaatttttaatggtaggggaaataccatataatcaaaagatgataggatgtattactcatatacacacagttagatataggtatgcctatttttataggtgattttccgtcttctctatacttttccaaatagtctacagtaaaaacaaatattgctttttaaaaaaataacttttaattttagattaatttacattaaattaaatacaaaagttgcaaagatagtagtgagttgcagttacctatccagattcccctacacttttattacttttaaaaattagaataagttactttaaaaataatataaaatggggttttctagcatatattatcacgagatagcttttcatagtcatttaggtatattgtaaaagaggcgttcaaagaaaaaaattacattatcaaaaaggcccgtgtgacttagactatatttattaaaaatgctacatttaactgagatctcatgcatttcacacatcctggatggaacactggagcgttagaaaaccctctttaaatcatttgtcctaaagtgatttaaatgaatccattgcttatcataggcttgcttttggatttgatgccaaaatagacttgtatttgagaccaaagaagttattcatctttcctccttgagctatatatttagttattccttctcagacttccttagccatataagtcagttttatatgagtctataatggatatgagttttagatgcagtcatctgaaattgaatttaccaagtagatgctattttaatactttgttttgactgatcaactcgccaaaactggaagctaaaaataatacaccttgtcattttagcaagtcaagccatcacagaaaatattaagaaatgacagcaactggtatttacagggctctctttgccatattcctaattgggaaccctttaggaaagggccagggagtggctgtggatctggggtagaaagtggcctgtttttgaatttatggagtagcgcactgtcagggcccctttcttcactcagaaatgaaaggagctggttcaccagagggtgtgagaactcattaaccacccccagtgcttcccacccagcaagggatcagaacatgtgctgctgtttcagagcatcacaaaatcttgttttcatgtgaggatttcaaaggcttagattgttcaatttgaaaattttgtcacagaagcgaaatgggcacctctataactcgtggtggtgttattttgtgggaggaccatccatgtctttttcccctatattttgaaatgaggtcaaacggacctgttccatccactcacttggcatttactcttctttgggtggggcccctgggagtgttttaattcggggtcgtagggtaagaatagattaacatggcatgacaaattggtttgctacaatcataattcgaaaggtaggtcagggtctgaagggcagagtagtggttctcattggggttgggtttggaggatatagtgggaacagaaggatcatatgtaagattcacccaagaaggtttttggccgctaggttccccatctgcctggttaagaatcccccaacaataaaatgcccctatacctcctccagcttacaaggcagaattcctgtgatgtgtagggcaaaacaaccccctactcttttgttattagtattctgctgctttctaagtaaatgttcttaactaagagaaaaatctatacactctatctctagaaggccagctggagagggagaagaaaagaaaattaagagacaatttggttggctatcattaatctttgtttagccttatgggaaaataagccttccttcttctatctttgttagcaggtagattaagttggttaaagaatactgtagtccatgaaagaaaagacaatggcctttacaaaggtattccaaagcagccgaaaatattttttttctttcagctattttgctgtctaagactcaatgacacttgactgatttggggtcagtatctaataagcgcatttcccagatgaaaaaccagcacagctaggccttctccacagagcctatacctaggtctatcgaaggaagaagatcattcagaattttatttttgcaaaccttcaaatgttaagatctgaataatctatttaggacagtcagaactgcctaatggaagttgcataattgagtagaattaaaaaccgctttccttcaggtcctccctcctttcccccatctgtgacaacctttgacattgcacagattttcaaagtcgtactgtaagattagtgccagggttctttcaaaggaggcttgtaagtgaaaaatctgttttcgcatccctcaaagctggaagccataaagaaaagaaaagaatatgcttttaatgaagtctttgcaggatcagctccttgcaacttcagttgttcatgtgaatcaaaaatagcagaaagtaggtcatattgtaaaaatgaattaggcttcacttcacattttattgactttactaggcttttttcattcacagtggttgattgttagctaatgactggcataaataaaaaggcatttattctcttattttccttattttgccatctacttctttagaatatcagtggggcacactatgtgcttagggatttaattttttcatgtatcattttcacaacaaccctgaaagctggaatttttatgctcattttatatgtgagggaactgaagctcacagagtttaaggtaaatgacccaaggacacacagctcattagaaaagatctgcagtttggacacatttctctatctggaggccctgctgttttcaattacattcttttgatttaaaaatatatatttttgatatatattagtgggaaataattaaactgaagtaatattgccaaatcttaattgcctcatgagacaatgaaaaatacttaccatggtattaaataattttttaaaatgataataacatttatttgagcacttagtagggaccaggcattatgaacgagtataggaaacagcaaatacacaaataagtaatagttaacgtgtcagatagtgaagctactacagagaaaaataaaatagggtgtaaggagtgtgtgtatgtgtgtgtgtgtatatagcaagggattcttgcttcagagaaggcatcaagaatagtatgaaatttgagcagaaatttcataaggaaagtgcaggagcaggtctctcagacatctggatgaagattacagaaataacaagtacaaaggccctgaggtgggtggggttgctgtgtttgaggaagaaggaagtggccatctccacagcgccctccattgtttccttagtgacttcctgccacagccaccagctctgtcatttgaatgcctttgtcctcaaggggcagagagactcccttagagggcatgaggaaaggcaggcagaatccacccccacactggagagggtggggagccagtttcatttacatatttaaatatcttcctcacaagcaataaatctcaaatcattttaattgaacatttaaatccttctcactggtaggtatttcaggcattcggctttatgccaattattgcgtcatcttaaaagagaagcttttaaatttattaaacccattacacttgaatatttgattcctgccaaaacataatttaaaatcctcactttaaaataatttggtaaggattagtaaacctaccacaataacctaaactgtgtgtctgcagaaatatcacccagtctctggataggggcaaactggtcctttgaaagggacttttcatggtagccccacgcaggcgaatctgcagtgtcccagtcatctgggctgctgcaacaaaaatatcatgaactgggtggtttgaataacaaacccttacttgccacaggtctggagcctggtgagtccaagatcaagcctccagcagattcagtgtctggtaagggtctgcctcctggttcatagatgatccgattcatagtcttctcactgtgtcctcacaagggtaatggcttctctgggacctattttataagtgcactaatcctatgagggcagagcctttgtgacctaatcatctcccaaaggccgcatctcctaataccaacaggttgggaattaggatttcaatgtaagaattttggggtgcagacacagacatttagtttataacatgcagtttgtctaagaagtggcctggcctgagtcttggagattctgattcagtaggtctgaaatagggttcagggttctttttccaaacaagtgatttttttttttttttttttttttttttttttatgagccaggtttgggagccacagatctggtataaagttgatattggctctatgtaatatagaacaatggagtggagcaacagtttggtctggctaagatgatgaaggggcacccgttacaccttcctttatgcagctatattagttgaggaaggctaggctatgctgcggtaacacattacacacccccctttgctcccaccccgcccaccaaaactcagtggtttaatattttgtggtctgtggctttctcctgcagactccagagctactgttctggatgagcagctttcctccaggcaatgccacgggcatcctggtaacttttgtccagtcacactgtgtcccctagggcctcctcagagttgcctccagagtcagctgaagagagagcgtatccatctttgtggggtgttttagcggccaggcatagcactgtccagccctccagcccataggctattgggtagaaccagtcccttggtccctcctagacatgaggggaccgggaaaggtagctctcctgtgtgctcaggaggcaagagaaatagttggtgaacacccacatggcattggctctacaattgtaacccatagtgcactgcctgatgcaattttttgcaggtcaccagtgtttttccacttgagtctgcctgatactacaagccacttcatactcaggatcatttacctctctgcaaccctggttcagcttagcatgaggaagaaccagtttggttgaactaagtcacactgaggtataattgcataacagaccccctaattgtcccagaaatcatttttatcttaaagtaggagtctcatcccagggatagcttagcttttgtcttttctttaccatagattctctaaaaatttaacagttttacaatgcttcttgcattattggcagcaggggttttcaggggcagagtagggtaggcatcctgtaggagtagatgattctaagtatggtgcttgtgagttggggactttctggacagtctaaaaatataagcagactaggtatgaatcctaagaagagcaccctcaagggcagaggtagtttgctcctatggtagcacaaatcctaaatactcaatgtgaacaaataaattaaacaatattattacctataattgcacagactggtgtttctcaaaggatgatttccagactagaagcatttgcattatctggaattttttttttaagtgaattgttaggctgtatcccagacctacagatttagaaattctggtgcagcaatctatgtttcaggacaaactgttagatttaaattttagataaaactttgcagcccaccaggtgattctgatgcataccaatgtttgagaatcactgggatagattttacctgctgattatcattttatcaaaatctaagtaattagggaacctcagtgggagtttttttctttttttttcttgtgggagaaggaaatgcacataagcctttcaggacacttgttatatacgcttctgtcgttttaggttaaatggctgctgcttttgtgtgtctgtctataatactctgtaacgagaatcagtatcttgaaagataaaggcaattcaaagattaacaattatttttgtatatactacataataaagccaaagaaatacactaacaaattttaaaaacatttaaaaccaatggttgattcaatgcctttgtagttttcctcttggttttactgatcacttttggtaactttcctctttttctattcaaggttctgggtggggtaatttttaggggcttgaaatatataatcttgatattggaaacatttccaattctcctcttccctgccacataacatgctgtcttagtgaacacttctaaacaaatttgaacccacgaagacccaagggcatcattatggacctcagttgttatgaattctggatagagcagatgaggctcgagaagagtgggcacaattctgcaagggctctgggacttgttttctgacaaaagtccctgatgtcagcaaagtttgtctctttttcattcaagaggtagaagcaggttcccccgagtactatgtacctcctagcccttgtgcaaacatcaattaatgaatcaaatccccaaataaaccctttccagagtggtcctctggcatatcagaaaactgttatcggctccccgaaattcttgatagtttactgaccttggctgtttgtactggccacaattaaagttgccagataaaatacaacaccctcaatgaaatttaaatttcagataaacaataacatttaaggataagtgtgttccataactaaaagtatgtaatattttattaagttgaatttagaattaagaatgaacatttgaatttcagataacagataattatactcattataagtatgttccatattacataatagttacaggacatactaactttatctaaaatttaattgtgtttcctgaagttttacttgttaattagttcttattagccacaactcatgtgactatggcaaagggatatttggaggctactcagatgtccagagcttcttaatccctagacgtagccactagtcagcaaaggcattttgcctttggtctctgtttataaaaccatcattactttataattgccactccacttttggatgtcctctcctttctcctctgttggtgtttgtcttcctggtctctgtcctgtttgcagagagaaaggctttcctgttagaaacagcaccagccaatctgagttcttctcttttgttttatttatttatttatttatttattttgagacagtctggctctgttgcccaggctgaagtgcagtggcgccatctcagctcattgcaagctccgcctcctggattcacgccattctcctgcctcagcctcccgagtagctgggactacaggcacccgccagcatacccagctaattgtttgtattttttttagtagagacggggtttcaccatgttagccaggatggtctcgatctcctgacctcgtgatccgcccgccttggcctctcaaagtgctgggattacaggcgtgagccaccgcgcccggccctgagttcttctctttaacaaactggtctctttctgacgactacgtaaatctttccttttggagctagatgatatttggatatgtgtgggtaaaaaacaacaacaataacaacaaaactgacattttcgaaagcttagctacctgcagtcctcttctatggttttttgtatttggtgaataatagaacctttttagttctcagagttctttgtgtaggtaagggtggcccatctaattaccaacaattagatgaacaagaacacctgaccctcgccagctcaggttctaatgagaaaccagtgcagatagtgtcagatacaacagggctcactcagccatttgtatgaaaataacagaaacctagtagcagccatgtaaagtcattttgttctttctgtcctagattccagttgctgcttctctctagagaccttttatgcttgtttagttctctatgaagtcaacaggaacatcggataccaaggaagcctgtaagagtgagagactctgacccaatttaaatgtcctcacagagttcagttactcaaaagaattcaagccttaaaagcacagagccttgaagttactagagctttacccaaatgctccataggttcctggattgcagaatattgctgaaatcttggttttgcccttcctccctcctctctttcacattttatttgggtgacgttctgcttgggaatgaccagctgtcactgccagtagctactgggattacattgcagcatgggcagggtgttttcgttttgttttttaaaatgccaatggatatttactggagctactgtagggattggcagtttcatttctgttttctgtggaggggttttgggtataatagttggattagaaacactaagaaaatcaaatttaaactctcaatctattgatggtaccaagcactaaccatttgacattaactggaaggagataccatcttaatcagaggctaaaatgctccctttgctctagatcatagcttatgaagagcagagtttgaagacagagacagtcaggtggtgtcagtttctgtcattctcacttggattcctgtgcagtatcttcacactgtttatttttaaagaattttcaatctgatgatactgaaattacttcagatcttctctaatctcatccacccttcagactgtgtttagttcccctgatatgtactttcataggttcgcgaaattgtaatgaacatattggggtgggagttctggagggcagagatgatgtccattttcttgaccccgaaattgtcagtgcccaacactgacctcggacacagtaggtgctcaccagatagatgaatgaattagattctagggcaacgtaatccatgcggtgtaatccacaaatcactcttatggcaatacattacaagtaatttttaagcctgatagagttttctgaaggtctaggaggggcatacgtaagttacctatgtgttgggttatgtgaagggaccattttctactcctgccccccagcatacttctgtcatctttacccactgagtgtcaacatggaatatgaagaaagactttgcaagtaagatgttaggaaaataaatttcatgtgctaaaacagatattggcaaacatttttgataagggcctagagagtagatatttcaatctttctagaaatacggtctttgtcacaactaatcaactaccgctcttgtagcacaaaagctgccacagacaatacacaaaggaatgagaatggctgtgttccaattaaacttcatttatggacaccaaaatgtaaatttcatacaactttcccatatcatgaaattctgttcttttaaaacgttttctccccaaacacttaccagtgtaaaaaaattcttaactcactggctatacaaaagcaggtagtggatctgatttgaaccacttggcagagtttcacaaccttgcacttaaaaaaaaaaaaaaaaagaaaagaaaacaacaataataacaacaacaaaaaaaacactaataacaaagccaaagctttggtgaggaaagggggcactttcattttatcagccttatagctttcctgagcactgaaatgagggacatagagccttttcttagtggcttatttttacaccattttgtgtttttctgtatgtttgcctacctgcatatgtgcgtatatggtagaagtagaccaagttttcaagttacgtgtgacatattttcatagcaatttggaatgatcaaaggaaattgtagaaaatacagtatggtcccagttatttttttaaagaaaacacattatactacaaaaatgatgtactttatatatgcttgtaaaaggttctgaaaggtatttactaaatgttaacagtggttacctgtgaaaattgggagtgtcatttttgaagcaggggagatattgatctttttctgacttatttgacaattttaaatgagaatgattcttgctcagataatttcactatttgtgaaattaaaattaattagtaatgtattgaactaaaaaaaagatatttattgaaagaaaacactgagcctgcttctgtgaatctacaaaaaatctgtgattttaatgacattgtaattttttcatattgacccttagtgaaatacagcttttggaaaatcccttctctatgagagcattgctaaataaggaagtgtttaggttttgtaggagtaaaaatagcttctccagggatgttgatatttaaaataatgcaaatgtacaataaaatcccacaatctaaactctggattcagcccatatacccagagttttagaatacatttctgactaaaacacaaaagaccttgaaagcaggtgctgtctttgtcccctgataccaatgtgttttaataaggttccaccagattttcaaagtctttggttaaattggaactgacatttatgctaattagctgggtttgggagtgaaacaggtaaaattgaattacaatgggctccaaactatatttatttttaaaatagtggctctgagggatatttggttctatttgtcagttatttcatatctcgctactttctatcattcccttcccgcctggtgtgttaatctggtaatctgaaatctttttgtctgcctgtaacataataggctgttttcctgtagtccatctgtctcctacacgaggtgaaagtacttttcagaaatggcttgggttgatattattaatctttataagcagagaattccttgaataatttaacagccaaatggcatgagggggacttggtataaaaatgaattttcctgtcagctttaaaaattacagcgtggcctgccttttatctgtgcaactcaaatatcaaaacaatggatgtttatgctctttatacagttttctgttttgcattacctaagacctaagacgatgaagaaacatttagacaattttggtttacttttttttttctgctagaaaaccgcaataagttaattagccaaaagaaagtccttcttgttctctgaaacaacagatgctgcctttgaccttggaatttaagggaaaatctatttttgattacatgtcttgaatttcttggatttgccagtgttagggcagcagttgtgattgagtgcttttgaaagtatatgcatgattttcaaagaaatcagtctgcacagctgttgctaaagaaatcgttgttctccgtccttccagttcattactatataaggttttaaaaattattttttccccctacttttaattggagttatcctagttacagatgtcacagcctctgagctactggtcttccacccgacaccctgcttcgttgcaaaggcctaaggttggagtatgctgcatttgattggcagggtaacattgttcctctatgctgggatggggaaatacagccagtcctgtgtttaggcaagccagcaggagtgggactattaatagccaactatgtgttttctctcagacacagcctctttacagtgctctttgcttgcctatcttttggaaagtcatgtgaatgcagcaaaagctttctaagaaatatgagggccaaatggcattactctgcgtgaagtatgcccacatgggattattagtattttgttagaagaccatttagcaagtttgtttgtttctgaatcaaaatccatagatgctcattgaacattttttgtttttttccataaatcatgtatttgagaaagacatcttgatgatgggaaactcttaccttggagaaacaaagaatcaagtagtgactttatcctctagatagtactgaaatcagaagtactttttccctttaagtgtcataaaacacaattacatttctttccacatattttcaacctgagcaaattgacagaccaggtcagcttttttcctgggtcattttcctgtgtattttctttttatcttctggatgtaatcttttatttgtagaccattttagtgaagcccctagtaacaatttatttaattttattagtcaatttataggcagagggcaagacacattagaatatcatcatgggtactaaattagaaaatttaaatcaaaatgtctatgttctttgagctatgcctgctaattaaagaagaggtaaactgctgaaatataataggccaacgtggaagggtccagaagaaccatggaggaccccctttcctctggcttgatcaattataagagagcaaatggaagaggctatacaactttctccagaaatgggttattttgcaggcatgagcagtcaggtgcatattgaatagccacagattaaactctcctctcctacgctttcggggtcatccttcaagatgcttttagctaacctccaagattgggtgagggctgatgctctaaatttcagtgtttagagactgacccttcctgtaaggaggtacttaagacatcctgtcttctcagatgaatgcttctggaaggcaacattggaatatctattagaatgatttgatatacaacaaggttatgaccttttggagaatacctcagtctcttcagggcattttccttcttaatttctggtaccttaaaaaggtctcgttccttttggttgaatgccttgagaaacgtaaggctataaaggaattttaacaaacttgattctctaatcaactgctcataaatccattttattgcttcaattatgcaaaataaatgtttaaaatttgtctgtcgggtcagccagttacccggtcaactaacctcctagccaacctgctaacctcaatgaatatgttgctctgaaactctttttttttcccccaaatcttcccaaagctattaaaaaataccaaggaaggatggttaaggcatgttttattagccgtagtagttaaacttgttaatttatcagtaaggggaaaaacactctttgtaattttaacttgtcttcatgctaaattccttccagactgtggttagaacttaactgcagaatttttgcccaacaatataaacattttctataaaactatggaaagttgcccattctggaaaaaatctaaagtacaaaggataaagcgtttctcaagatagaatttcatttctggtgtttttgcatgtaattttaaattttattttatattttattttgagacagagtcttcctctgtcacccaggctagagtacagtagcaggatcaaagctcacggcagcttcgaaatcccgggctccagaaatcttcccattttagcgtcccaagtaaataggactataggtgcaatcatctttcccagctacattttttttatttatgtattttaagttttatgtagacagggtcttgctattttgaccaggctggttttgaactcctggcctcaagtgatcctcccaccttagcctctcaaagcactgggattacaggtatgagccaccatgctggccggcatgtaatttttaatactaagtctaggataaattttcttttgcactcattgggatatgtgttgatacattgttaatctttggaatcccactggaatgaaatgtgtttcattagtgcttaaactaagatgtgttaatttgagagtttataaaaggaggtttaagcctagtgcattttcaaagttgctttttttcaattaaaaaaattttgatatcttggcaaaaggataaaatcgatagaccatgtaaagaactgcattcagttttaaaataattaggttttgaagatttattctactgtcttttatgagtaagaacatgtctaggggttttaggaggataggtttaaacaggtttacaatatttccttataagagctagattatgtatacaataagaattaacttaagaaattttgctttgaatttctccaagattttctagggccaaccaagcttattctctttaaacagaaatttaagaccattagtaaataaaaaccttaatatgttttggaaaatgattacttggactcagtatttttttgtggtgtatatgctttggcttgtgtttaaattatgttacgcctgtgttttgatcaggcattaaataattgaaacactcatgttaaataattatgcaactgtctgatttagaaggctggaaagcagcagcaaacctgtttccagagacatttcaatctataggccaggttcaggctaaactatatagtatgactctccttctttctacactgaggtatagaagcagcatagggttggggtggagacagacctagtacaaatctaagcctcttgtttatgagctatttaacttcatgtaagttatttgagccccctgagctttaagaattagatgctttctaaatgtcaagcactatagtagtaataagcacacacgtttcctttccttaggatggttactgtcccatgggaaaggtagacacatgggcacaatttcaatatattctcaagttccaagaagcatactcaaagtgccatggaataggaacacgctgcctagcagctcactccttttgggcacacatttgtctgatacaactacgtgctaggacctggataccaatgtgaacagaaaaacacaatcctaacccctctattgtcttataacctaaataacaaagtgatgactgtaaactagaaagtctggggcctaacttatagggttcgtaagggtgaaaagagctttctttccctttcttgtcatcttcattctgttcactcacgctctgtccagattcccagtctcccatttgcctaagcgggcaaagaggtagttgtttctcttggttaacagttctatataatgaatccctttacagatgagtgactgaatacttcttcctaagaatagttgcattattaccgaagacttttggtggcaccaagaccatagtacatgtctctccatttggcagcatttcagccattgagcagtcctccatggatagctggagtgtctctcccacatcccactatcatggtgcttggctgctatccagatgcctgtgatgagtgatggagtccctggtgcttcctggagagaacaacaaatggtagtcttgcaccaccttgattgttaatatacttggtctgtggacttcccatgctcaaacctaaaccaaagaacctggcctgacccggaacaactgctttgttacaggtgaaagtccttgttattactttggtagttaatcatcttcccctgggccttaaactccaggtcattctctggagaagaaatttaggacctgtgatattatcctatttaagtacttttcagatacgatcttttaattataaaagatatataattatatattttatatgatatatatcatataattatatattttatatgatatatatcatataattatatattttatatgatatatatcatataattatatattttatatgatatatatcatataattgtgtaattataaaatgtaatcgcttgtatatagttcttagttccttaggcaaatcaagtaaatagtagttgcatgggtaaatataaaatacgcaaatactccttatagtaatataagaactatcattcaggcaggaggacacaaaagatcaatgtatgaaccattcctatatattttttccttttgaagcacaggtaggagcaaatcatttcccttctccacaaagctcagtggcttcttactgcactcagaatagcctagtttataggcctctgtgagctgcctttcttccccttttcatccaaagtgtttttaaatccctttagatactctttgctccagcttgcctgggctattaactgttctcccgaagaccatactttatgtctgcaggcctttgctcatactgtttggtcagcagggaataaattttactccttattcatttataaaatcctaccgatcctccaaggctgagctcaaatgcctcctctttcatgaaaccttctatatccctactaatcagaatcaattatttctttctctctattcctccttgttggcctattgtgtgtacctttattgcctgtataggcttttctcatttctgcttgtatctaggtaattcactcatctatccatacattcattcaacgattatttcttgaaagctttatcttgtactgtgcaagaagatgggaatgtaatgggaagcagaaaatggatgctgcctgtgctctgggagcttacagtcttctggcagagatgggtgataaggtgataagcaccaaacccacaaagctaaaactgcagctatgggaagagcggggaagacagatttatgggtctctgtctctaggctgtaaactccttgacgccagtgagagcctctttcttggttaagaaggcagtagtataaaacaactgtgaaatgccctgtgtcatgagtttgtatctccccgaatatatgaggaagtcctaatacccagtacctgtgaatatgactttatttggaaatagggtctctgcagatgtaatgaagttaagatgggatcatacttgattagagtaggtcctaatccagtttgactggtgttcaataagaagaggagaaaagacagacacagacacagtggggaatgccacgtgaagatgggagcagagatgggagggatgagtttgtaagccagggaatgtcaagaaatgttggtaaccacaagaagttaggaaggaggcatggaactgtttcttcttcagaacttccagaaagaaccaactcccaatgacaccttgacacctggatttcagactcctcacttccagaactgtgagagaatgcatttctgttattttaggccgcccagtttgtggtagtttattatggcagctccgggcaactaatacacccttctggagagaagttcatgagaactaatttaatgcacaacaccatggtgcactaatgtgtgggtcaatgattgaatttggatgaaagaatgaatagagtattgtgtttgctctcttcagtggtaagagatcagggtgagttcaggatatttgttccatttcagttgtctattaacaggaaaaaatgtggattcacagttcacgtcatcatcagttgagaaggctggctgaataatggcccgtgtggttgtctttagaaataaagctgtgtttttgtcactgtggccaagggggatataaataagctagtcactaaatgttaaaatggtggcaactcttccctttctgctttcaaagcagaatcttagtcctcacatctcctacccctgcttcctcaggcaattcgtgtttttccctctggttgaaaggctcacttcaggataaagcaggagggggggtttgtggttgttgttactaatgacttttagatcttgtgttgcattttatattttcagaacattttacagttgttgattgagttccctagcactcaggaatttgtgatattaaaatgctttttgtttgcaaaggacaaagatgttcagtgatacttgaaagctacactaatcagatattcatgagtatggggtgcggcctgacctcccttctgcctcctgaatccttctcctcactctagattcaggacagtgccacctctataaatgatcccctcaagcctcataactctctatcgttttattgtgttttattatttatttatttattgtttgtgtgggttttccctagtagattatgaggttttggaggacaggtaaccacactcacccagcaggcatgcaggaactatctcttgaatgaacaagcgaattaatgagtgaatgaaattactagaactgacttaggccaggaatttctcatcttttagcagctacttcccattttatacatccaagatcatatccgtgaaaccacagtgagtctttagacaaattacagagaggcagaaatgggatggcaacatcaacttggagaacctctggatcagccataggctctacatggatcttctggtctcgctgtcatggaggattgagtcatattttcaaggctgtcctcttgagaccactgctcagaggtgccagtcaaaggtctcagggtcataggcagagggggaaggccagataggccactgtggctctgagtatagagggataaggctaaagtagaggttctcataatccagaaatcgtctctgatgctggaagtcttcagctgcactaagagatgtggttgtaaagggactccagcaacagaaagcatagccatcctcacctcttgagaatgagctttgttttgcttatgttattttacttttcatctatatatctgcgtgcttatgaacatcctgtaatatggcaccaagtattaaacatttatggagcaactgaaatattcaggatagaatgtttaaattagcgctggtctctgccttccttcctgcctgtgtgtttctctgttttgtaccctagcccattccggcaacgactatagagcatcacacttatcagatgatgtcataccgtgcccggatgaaagctagttctcaaggcactcagatcatggcacaaaacaaagaggaaagatgtgtctttaagtcattcatttagcactataactgcattttcagagggaacttctatccatgtttattctcaagattgaaggactcagtgcagctctcgtggtgacagattggctcttcttgtgtgttttttctcttgctgtttagacgtaaggaccccttttctcccacctcaacatggctacatgtttgttatttcatgataatttttaaaaaaatcataagtgaaccttcacactgttagaattatttaattgtaagtgaatatcttattagaattatttttacctgcaagactactcttttatgtaacaactgtctaatgacaaaagtggtaattatatactttgctacctacaaatgataggaaaacagagtaagctatttctggggccctctctgccactcattctgtgaggcctccatcacatcacctgacccctcacatccacagctttcctaatctttaacatgaacaggttgaagttgaggatccctaatttcccttccagatccactgttctgtgattctaggtatgtgtaacccagctatttaaaaaaaaagaaagaaagaaagaaagaaagaaagaaagctaaatgttggtagagagtatcacaaaaaaataacaaagatacactttaaaaaattggtcaagctgcaatccttagaggcaatattcctggttttgagtttataaactacctgctggtaaaatctcttcagtagtttctacacatttgcattcttccttcgttttcaaaacactgtctcggtgactgcaaagtgattcccctgatgtataatctcttattcggcgtagcaccctgggaggatgcgagatccacgtggagaagttaagcacacacagatctgcaaggtcagaagtacattaaatggcacgctgtggtccaagactttcatctttaagcatcagtaattgccatgaatactcaaggaggtgccctgtgtgagagctgctggatttgagccataagccatagttcaggaatatgaatcttgtgaaagccaaagtagtaatattgtcagagacacacaggtaaggccatgaatgaataaactggacatcgtgacattccagctgaaaaaagagcaatttattaagtttcagcaccatagatgaaggaaactggtaaatttactggatgtattttaggaacttaaaaattgatgatgaaacaggaaagagaccccagctaaaagaaaacttctggcacaaacaattcaaagcacccagttaaatagatcttctgacccattggatacccaccaagaacaaggcaatttgggcacatccaaagtggtttgtgtgggtagtcgttaaaacctgagtattacttcaattatctgagacctaacggagggcagttattctaaatagtcaggctaccaccctctagatgcaactgttttttttaagtttgaaaacggaaatatttaaaataatatactacatatagttacatagaactattttcatataaaaataatatttttctgataattttggaagaattagaaaaacacagagctcgcaaatggatcatctcactatccagagataacttttattaatcttttgatgtatttccttccagtccccccatattttaaacttattatatattcatttgtggacatatttttaaaatcagatatgccagtctagcccttttttttttttttttttttttttttttaatctggagctgccgttagggacagctgaggaagtgcagagcaatgccacaaaatgtctcccctccctttttttctccacagcccagatggctaagatttgtggtgggtgggcaggcgcacccgcccccaacccccgaagtcacatgtactcttggtggctttggcacttcctgaccttgcgtgtatgtttgctgctggaatccttcacactcttgccaatgcggctataaaaatctaggtggctgagtttttgcttatctgaattacaggaaagttgatgatgaaagagggaaatattaatgatgggttttgttctctaaattcctttgtaaagaaaggatgtgatttgttctattcttccactcacataacttgttaaaataatgggaaagccaggaaaaaagtgtttggagaatgatggtgaatacttttgggttagttgggctcaggtgacatgcttgttttctgggggaaggttctcaatactaagagattacttccaggtggcaacccaatgtagaaaaatcagcgtgtgctctggaatcagacaaacccagatctgaattctggtttttcttccctcttttgtgtcatcttaagcaagttacttagtttccgtgagcatcagtttcttcatctatgtactacaagtgatggatgcatacttctcaaatgtttagggagcttaaatggaaatatacttggagttcctagcacacagtaggtgcttactcgtgagcttgttccttctgcatttcccagctgtttctggaaagtgtgctgtcatcagcaagtgagtgaataataattgtatgctaatatttacccacacaaatacttcgcgcaaaactattcgtataatgttaatcagtgaaaaaggttctcatcatgtattatgagttgaattttctttcccgtctattaacaaactttgaatgggaaagctactgaattgaattttttttctctctctctctctgctatactgtggggacatgcttttatatttgcaaataaagctcacatatatctttttattacattctcaccatcccaccagaattttaatgagtaggagcggtgagtggagattgagattcaggggccacttgtgtttgagctgacaagatatacacatttggggaaacagaacatgatctgaattaactgggaagcacatgtttcataagtgcttgatatattcctgaaagaaaattaaaaagtaaatatttttgcttgttgcagccattctaaagagtgtgctatcagctttctttttgtttgtttgtttgttttttaactctgcttatcaacatgtaaggtgagggactagtagactttgtattataatgcttgaaaagaaaagctttatttaaatatcaaatatgaacatgtaacaagagattgcttaacaactgtgtagaataggaaaaagaattggaaaattttcatacaaaaagtaaaagaaattgaggggagggaaacaaatgaatccaaactcttattttcttttctctgttaactttcaggaaggccaaaatgagatttaatgtactgtatgaagtatcttgtagctttgctgttttgttcatttgcttacccttttatctctcttaaattttaatttctaaatctatagccctacattcattaattgatttggttatcaaacatcttttctgtgctagttttaggagaaagaaaaatttcccctaaaattgtaaattttgatttacaattgtgactgtaaatctcataatcttggtgggttgcaatcctgtaaacaaaaatgatggctcagcagctctataagaggctgcattagattcagtatgagcccagtcccactgtttgtggagggagaagatgcagtccagacaagtccatagcttcaactgtgagtcatatagtttgccaggcagagagctatgggaggtattaccaaagaggcagtagcatgtgtcttttatcatggatcatttcaattttttaaaaaagtaggtatgttataaataataatgaaaaatgagtaaagaagtaaaggtggtaactaacatgggaagaagttaagtaataggtaaggaagtgtgtgattaagagctccagtgagtggctgtgatgatgggatttcagaaaaaggatttctttgcaaaagcagagaggaagaatagcagatggtgaatgagataaagtttttctccccaagaggacaactaggaagcaaaaatccagagaaaggaaaagtctgggctactggtgaaagctggacttcaagaaaaatagtttaaggatgtttaagttttttagtttttagacacccagctgcttgtgtgacaccacattgcaaagttattatttagtaatattttgaatgaaaggtctctcttcataaaacccccaccctttacaaactattagtctcagaaaccctttacattcttaaaagttactgaggacttcaagaagcttttgtttatgttagttatatctaccaatgtttattgtaagatcagtaattgggagtttattaaatataatgaagcatttttttaaactttgattttggttcaggggtgcacgtgcaagtttgttctacagataaattgcatgcttcaggggtttggtgtacatattatttgttcacccagatggtaagcatagtacatgatagatagttgtttgatcctcaccctcctcccatcctccactttccagtaggccctgttgtctgttgttcccttctttgtgtccaggtgtactcaatgtttagctctcacttattaagtgagaatatacagtatttggctgtcttttcctgtgttattttacttgggatgatgacctccagctccatccatgttgctgcaaaagacatggtctcattctttctcatggatgcatagtattccatggtgtatatgtaccacattttttttttccagtctaccaatgatgggcatttaggttgattccatgtttctgttactgtgaatagtgctacagtgatcataacatgtgcatgtgtctttatggtagaatgatttatattcctttgggtatatatgctgtaatgggattgctggttcaaaatggtagttctgtttttaagtgctttgagaaatcaccgaactgctttccatagtggcaaaatgaatttacatttccaccagcagtgtataagcattcccttttctttacagccttgtcagcatctgttgttttttgactttttaataaccattctaactggtgtgagatggtatttcattgtggttttggtttgcatttctctaatgattagtgatgttgagcattttttcatatgcttgttggatgcatgtatgtcttcttttgaaaagtgttcatgtcctttgcccacttttaagtggtggtgtttgttttttgcttgttcaattaagctccctatggagtctggatattaggcctttgtgagatgcatagtttgcaaatattttgtcccattccataagttgtttgctttcttgaaagtttcttctgctgtgcagaagctctttgatttaattaggtcctatttgttaatttttggttttgtttgaattgcttttggcatctttgtcataaaatctttgccagggcctatgtctagaatggtatttcctgggttttcttcaaggatttttatagttttaagttttacattgaaatttttgatgcatttttgagttgatttttgtgtgtggtgtaaggaaggggtgcaggatggctaaccagttatctcagcaccatttattgtatagggaatcctttccccattgcttgtttttgtcagcttcgtcaaagatcaggtggttgtaggcgtgtgtctttatttctgggttctctgttctgtttcattcatctatatgtctgtttttgtactagtaccatgctgttttggttactatagcactgtagtatagtttgaagtctggtaatgtgatgcttcttgcttgcttctttttcctaggattgttttcactactcaggctcttttttggttccatatgaattttataatagttttttctaattctgtgaataatgtcattggtagttcaatagaaatagcatttaatctgtaaattgcttgggataggatggccaatttaacaatatcgattcttccagtgatagatttttcaagtacaagaatatataaacatttcattagctgcagagtgataacgtcatctcgtggcacatagcctctggaaaatttcactgtacaattgtgaagaatgagaatgaaaaagtcttataacattatagtattattataaagatgtcttgacctcatggacccctgaaagggtctcagagatcctcagaggtccccaaaccactttgagaaccatcccagaccattgacaggagatgtttatactcaagatttgggatgattgtgctgattctttcatttagtcaactgtcagttctttttccaggataaataggcttatacgcagttttgaaaatgaaggctgaatttcacaaatcacttgtggtctggaattggtactactagtggtaaaaaagtaagaaaactcaaaacaacaaagaacgaaattcaatagtttctaatctttcagtaactattttgcacagattaggttagacttctgagtcaaatgaatgaagagaatgcatattaatcatatatcacaaggaacttcttgaccccttagagtaagtgaacatggaatgtgtgtgcagtttctaaacatggaaatatgtaagaagaggccttcccttgaagtcctggttgacatggatgaggctggatgcagggtttctatttgatgatcctgagcctggcatgactttcagcttttgagattctgcccagagtggtagcacagaatggcaatttttgccaccaccagcctgtttttactactctctcacctcaccaccacccataaaatttaatagaaaagaaataaatagaaaataggttttggaaacgtatgtgaaggacgatttggtattagggctgagtgtttttagactagctacctttttactatcaacctctggccgtggccatgaatttctcggtctaaatcttttttctgaagatgcacagtagacaagcctccctaaaacatgaagcatgctgttgactttgttcccggggcttgtgtctgccaagtctgactagtcagttcccatcgctgctggctgaggtttttcccatcaccacggcagcagaacacacttgccttctctctttagatggtttgttattttaagaaaagccgagcatggaatcgctgggaatcattgctgcttctgaccacagagaacacgttttccctactggttgtttttcttttcagcttcctggggctttagtggtatttacatttaggccctgtcattttgctttttcatgaaagcccatttgaatgaggcacttggaatccaaatataattttgttgttgttgttcaaaaggaatccaaacgtttaagagtctcaccattggtcactgaaatggaaagattaaaaaatttcatttgcttagtttttcttctttaaatttggtaaaagtcattttgcatgccctgagaagcgcagctggcatctataacctgccttcctactttataaaatgtaattttgtactccccactttcagatctgtgatgcaaagttggtgaaagagtcccgaatgaatatccatatgaaatattttctttttctttaatttaaattttaacttttactttagcttcaggggtacacgtgcaggtttgttacataggtaaactcatggtttgggggtttgtgtacagattgtttaatgacttgagtaactgagcatagtacctgacagattttttttctgaacttctccctcctcctaacctcctccctcaagtaggccctaatgtgtgttgttcccctctttccatctatgtgttctcattatttagctcccacttataagtgagaacatgtggtattttgtttcctgttcctgtgttagtttcctaaggaaatggcctccggttccatccacgttcctgccaaggacatgatctagttcttttttatggcttcatagtattccatggtatatatgtactacattttatttatccactctgtcattgatgggcaattagtgatttcatgtctttgctattgtgaatactgctgcagtgaacatatgcatgcatgtgtctttatggtagaataatttatattcatttggatatatacccagtagtgggattgctgggtcgaaatggtagttctgttttaggttcttcgagtaatctccacattgctttccacaatggctgaactaatttacattcacaccagcagtgtataagcgttgccttttccatgcaacctcaccagcatctgttaattttttactttttaacagtagccattctgactggtgtgtgattgtatctcattgtagttttgatttgcatttctctaattgttagtgatattgagcgttttttcatatatttgctggccacatgtatatcttcttttgaaaagtgtcttttcatgtcctttgcccactttttaatgggattgtttgtgttttgcttgtacatttgtttaagttccttgtggattctggatattagacttcgttagatgtatagttcagaaatattttctcccatcctgtaggttttctgttcactctgctgatagtttcttttgctatgcagaagctctttaatttaattaggtcccatttgtcaagttttgcttttgttgcaattgcttttggcccagatgaaatattttctttaatgggaaaagagtgtttcaggtcctcaaatgttcctgcactcattgtagccttttcctcagtggtctggttgaagaaaatgaaagaaacaaataatatgtgctatgtactggccgcattaaagtcaggttatgctttagctctctaagtgactagtgctgttaatctagtgtttattagcactgttttcaggcacccttctcacttaaagcttgtctgtggccccattttctttactttttcctttttttttttccctgtggcagagattttcaatttcttttttttttttttttaattatactttaagttttagggtacatgtacacaacgtgcaggtttgttacatatgtatccatgtgccatgttggtgtgctgcacccattaacttgtcgtttagcattaggtatatctcccaatgctatccttccccactccccccaccccacaacggtccccggtgtgtgatgttccccttcctgtgtccatgtgttctcattgttcaattcccacctgagtgagaacatgtggtgtttggttttttgtccttgtgatagtttgctgagaatgatggtttccagcttcatccatgtccctacaaaggacatgaactcatcattttttatggctgcatagtattccatggtgtatatgtgccacattttcttaatccagtctatcatggttggacatttgggttggttccaagtctttgctattgtgaatagtgccgcaataaacatacgtatgcatgtgtctttaaagcagcatgatttataatcctttgggtatatacccagtaatggggtggctgggtcaaatggtatttctagttctagatccctgaggaatcgccacactgacttccacaatggttgaactagtttacagtcccaccaacagtgtaaaagtgttcctatttctccacatcctctccaggacctgttgtttcctgactttttaatgatcgccattctaactggtgtgagatggtatctcattgtggttttgatttgcatttctctgatggaatggccccattttcccccatcaccatggctcctcctctgctttccttgtggggctttcacattcttggcacctgctgacctagcagcaggcatttttctgccacttgtcaactctcatctgactgtggccaccttgtttccctgcagacatccatatgtactcttctggtctctctttttacataattcctctcacctctgttccttcacatattcctcccacccccacctcctctcatggttcaactcaggtcacccttcctcccccgggccttcttcagtggaagtgaatccatgttggctgtcttgttcttcagcgcctctgcacatatccagtctacactctataaaggttccttgcctcggactatctcacctgactcacagtcataatataggtcctggtgttgccttcctctgaggataggaccataggctagcaatgatatttttcttaacaccaccagaaaacaggtggagtcagggggctatgtatagagtgtttactcatacctagtagcttttgaagagttgatcctagaagaatagtgaaatatacatgtttgacagattggagatgcaaaggaaaaaagtctgagttgagccttgggatgctcagttctaaggtttttatgtgaaggccatgccataaaatgccccaaattcttgatggaagggcaagcatttagtaatataattggaatgtgttgaagtgttacatattctatatgcatatgtttacatatataataattttctgtatttagtgaaacaaggatgtgtgatgggctgtcaaaagatgttttttacttatgttaatcagttctacaccagtgtcagatactttgatacctgaaatatgtgtttcaaaatttcaaataaaatttatgacatgaagatatcatagattattaattgaaatcatgctaatgtcatatattaggccatttagagtctggaatttggggaaggatggaaatgaatattcagattctctgaagcatagaaagaggcagggctgactgtctccaacttaaatttttttttcctagtagtaactgtctatttactttacactataattgaacaataaaaggtaagtgaagagttgttttgattctgtttaagtttaggaggaatattattttttacgtgtgtgataaaaactttattttgcttgactttataaatgttgggtaagttggtgttagcttcactggctttgttataagcaattttgttattatataaagtaattactgacaacctataaagaaaaaataagcacattataatctgaatctgattttgcattgcgtagacacaactggaaagactgtttatgataaggaaaccagatgatttgagcaagagagacttgggctggatgtggagcagatggtggaggagatggagaccctcaaatggaaatagctctatatttcctgcaggtgcaaagggctttataaaagggcaatgagagagggtagaaggttagaccttgagttctcattcttttataaacatttaacaccttctgatttttctctttagatactaaaacattatttacaaagaattaatgactttcctttaaaacatataatgaattcattcataggacttctgccagaatttaaggcctatgctctggactattcagcaaagaattcataattcaaaagaaaattttaaagtctaatgttcgggttcccattggagccaaggtttggttatggaccaatgcaaggatacaggtacacttacccacattgacccaaagatgcactgacattgcccctgaagttgattactgagcacttcatagtatttgagttgtagattttgtgctattttactttggtctatataacaagtgagaagttatccactttctgaagcatatttattctaagtctatagatacactaaacagacaaatctctttgagtgtggcagttgaagtgtcttgatccattccaaactaggaatgcacctcctggactgtcctgtcattaagatgaggcctgacccctatcagagacaggcttgtgaggccaagaacacaggcttcatccaagtggccccttagcattgccattttccatgacccacaactgtaacccaagctcagtcagctgctgtttttcacccccactcccctccaccccttttaaaatagaacatttcaaattaagcagaagaattgtgagagtaatacaatgtacactggtaggctttgcatctaaatttgacaatgtgaacatttcgccaatttattgttttgtgtctcctcccatacgtatgtatatgtatgtgtatacacaaattttttcccctgaaccatttgaaagtaagttgcagacatcatgctatttcaccccaatgtacttcagcattatcactttagaacaagaacatgtcacagtaccattaaataccaaggaatttgacaccaatacaatatgccatttaaacacagtcccttctaagatttctccattagttcaaatgattactgtatagctgcttcttttgatccaggatcatgcattgcctttagttgttctgtctctctttagtcttcttcagtatagaagagttccctacatttatgtcttatctaataatgcagtgcagtgttgaaaagtccaggctaaggctggatgtggtggctcacgcctgtaatcccagcactttgggaggctgaggcaggcggatcacttgaagtcaggagtttgagaccagcctggtcaatatggtgaaaccccatctctactaaaaatacaaaaattggccaggcatggcggtgtatacatgtagtcccagctactcgggaggctgaggcagcagaatcgcttgaacccaggaggtggaggttgcagtgagcagagattgtgccactgcactctagcctagatgacagagctgagactccatctcaaaaaaaaaaaaaaaaagtccagctagttgtttgatacagtgttctacattctgtatctgtctgcttgctttctcacagttagaacacagttagattccagttaattactattgccagagcaccatgtaggcaatgcttatccttcttgttgcatcacatcaggagtcacataatgtttgctcctcccattcttggtggtactaaattgaaatccttggttaaactggtacccactagatttctccattgcagagatttctcctttgcttttttgtaattagtaagtaatccatggggtaatattttgaggaccctgtgactctcccgatccaaacctttacccaaagtttttgacatccatccattgagaattcttgcctgaatcatttttattttgatggttgctgaagaccagagccttttaattgaacactaattgttactgcaggaaccaggaaagagtggaaacggagcttcaaggcagaaaccgcatcaaggaaccaattgaacagacatgtgtcctattcatctttgtgccctttctgcctaacatcatgcctggcacaaaggaaggtctagaaaaacattgtggttgagaaaatcataaaaagaacagtacttgacgatttctttttaatgaggtctaacagtatctgcttagaacattaggatatttccctcggaatatgatggatatttgaatatttcatcaatatgcactgtgagttttatcagcatgcagcatttcttctgtcaccatcatttatattgaaagcacagatttttttttcactcacaattctctgcccagaatcatctttaaaacagcatatttgtaggtcttataaggaaaggatgttctcctttccagaaataatgtcagatgcatacatttttccctttctctttctgagaaaatttcttccttacaaccttcaagatatgtcatgatgattctcactctcagtaggatatctgtaaacttgcaagaagcaaaaccatactcctgttcttcctggccccatagggcatgaccgtgctgtgtgagtgccaacagagaatgctgctgtggttgcaccattttcataggtacataggtttgccagccataaagttacttataaatgtgctcatatctaaagactcatcacccagcgtgtatttttctggacctcactcccaagtcagaaacattacccgtcttagagaactttgagtttgcatctaaagatggaactccatttatctttgtgagacttctttctcacacaattcctgatgtttagtagtttgtaaatgcatttgtgtaccattcgtgtttattaatattcaggaaatttagtgttagcattcctgttggttatttaatttgaaagatatcattcatccctgtgataggtgtttctggttccctggaatagcagaagtatgaaatgccataaattgtctccttgtacgttaggtgttgactttctctcatgggttcttccaaagcctgtggctaccactcagcacacttaagactctgtcaagaagaggtgctaccaaatatcttcaatagggcctggattgttggagcctcctaacaactcagtttgtaaacttgatgctagctttattaaaatatggaggaagctgaagcagtgggaaacctatctgacttgtttttttctccaacttcaaatcagaaagctatagtcctggttggccccattttgttctttcaggcaaaagaaagatatcccatcagaaaaccatctaagctgaggctgagcaacaaatagttatcataaaagtcacctttcattgtatcaagtagttaagcaatgcccaagctgcagtgtggtcactgatagggcagctaccatgttggctctccacacttccatagatccgtctggcaaggcaacaacaagcccaaatgaattcagagctttgttacttacacagacagcaaaatcaagatcagtatgccatcagctccttgcctccctagtcccacacacaggatgacaccaaactggagaggccagaagacaggtggcatgacaggtgggtcactttgccctagaggagccacctctaaattacagccaagtagttttattggcacagaagcctgcggctgtgccctaaggggaagggggtttgcaagatgcaaagtcctgtacacaaccaaaacaaggaagatggatgggaaaggtcttgtgcagtctcccacaaaatctggaggtagatgagaaaccgcctcacaggagctccccacaaggctgcttgtcttccttcatttcaggaggaatttcagggcatcccaccaagacttcggtcagactgtggctaagctttgcctctatggcctataaggggatgtgcaaggtcaccatggtgccatgatggagccattccttgcatattgcccttctcatctatcagcatgggaagaagtttgcagaaatgaagcatccagagttttgtgaagctggttaggtgaaaaattaaggcttttagaccttacacattatttttttcaggataggatagatgtgctgcaggaacagataatccaatttctggtggctttacacacaaaggtttgtattttgtttattgtacatatccagcaagagttggtagtagtgttgtattccacacagtcattcagggacccaggcccatggcagcagtttcactatcctatagccacaacatctgcaactcatgtccccctcagttcaccatgataagaaaggacacagccagaagatcatgtgccagctcttttacactttggcctaaaagggacacaaatcacttctggccacaagttactggtcagaactatatcacgtgatctgacataactgcaaggggctggaacatgcgagggaacagagggaatatttaataagcatttttgtttctgccacagacatatatttccccaaagtcaaactatcagtctggctaagtatttttacaagtgaatattcgcaaaaaaagttccatttgttaatgcttaacattttacaaactgctttcactgtaattgcccttagaaaaaggtttgggggaaggggcatacctaaggctaagaccatgaatgacagtgttcctgacctcagaaactacagttgctccatgtacagtacttagatagaaaccaacacacactttagcctgtactgattttggtggggactcaaaggatcattttgtacttgttcatattgaatggaaaccaagtggtgtttggaacaccatcctaaatcatcagaggcactgtgctattctagaagcagtttgcatctactattccaaccccagatctatattgtaaggaactaaatccctttcttggaggaaatgaaatggtgttagtattgcaggtgcagattttactctccacataagtcaaagtagagatttaattgccactctttagaagtgcaaaacaagagaatgtaataattagaactgtcattatatactttttctttctctgatgttgatattaactggttttaaatagtttctaacctttactttgatataattattaaatttttaacataaaactcaaatttcattttttacacttaaaatgctttaacagatccatgttaagttagctgatgaagatatgtgaaagaagtaataaaattatattgtttaatttttctcaaagacatagaggaaaactgtctccaaattttatatgacctatcagtgataaaagagacatcaatattttgttgggatataattaaaaactgataatttgggggaaaacttttaaacagcctttccccaatctgtacaattttgacgttatcatgtgcagccctgacaggagttgccaataaagttagttttattaatatcacttgagggaaaccagcagtttctattggcacagtctgagctccagcaggaagtcatctctttttctcagtgcattacttacatgtgaaagttggggtgggggtgcaaaagaaagtatatattgagcccaacatatcgccttatttgtctcccctctctatgggcatggcatctgtgttttgaagagtcaatgggggagaaaacagttgtgttagtgcttgaaataggatgcagtacattccctctcttcttgtcttctcttccttccgcccccggtctttccccttttggaaaggggagttatcgagagactgagatctcagagccaacactgaaaacgacaccaaattatagctgtgtccagatacctaggatcttgactggccttatcataagaggcaaggactgcggtaaactgcacatcagggaatttgatttcttggtaggtttaaacagctgaaggtagaaggaaaaaaaattaagttcttcctgttatattattaacttatgagaacagcgaaatctaaaagaaattgttctgcatagttgaaagtaaagatagaatactcaatatattttctacaattcatctctgatagaggagaaagttgttttgtgagggaaagccttggggaattacttgtgttctagataaaagtgtcatttaagaatttattatggaaaatttcaaacaatcaagagagtggatagaatgaactgacttgtaccttacttatcttcaataattatcaatattttgcccatcttatttcagtaactctaccaccaccccttttattttttgaatgaagaattttaaagcaagtcctaaacatcctgtgaggtaacttgctccaaatctcataatgagaaggtggtgaatcaggattgaaaccttggcagtctggctccagaacccacagtccatggaaagaggacaagtcagctgtgaagatcgcttaaatggatttgttcttaaaatcaatgtaactaacaagcaagcagacattatctggggaacctccactccaaactgtctttgaatctaggggttccatttttaaaaagggtgtgttggggggaagggtaggttcaggatttagtatcaggtgccctttttactagagtagcattttatgggtgtactcatgaaacaccagttaatttgccttggctgcctctctccaaaacatatttatagaaattaatatctacccaggcacttctgccaacagttcaggaatttaaaatagtgggggtcaagcacaggtcgtggctgagagaaggctggaagtccatgagttctactgtgatctgacaaaatatgaggagttgactctttaattatagcattttgggagtaactaaaggtttgacacatactgttctacattgtttaaaaatatactgtttttagagtacatagaacagaacttaaatgactgctaatacctcagtgacactgaatcaatcatttgaattcagttacatgtcctgagccaaagcctagtactcgaccttgcattaggccctctgtgatctgtgggcgtcaaagaaagatcctgggaggggcatgtcctgcttttaaagagctggcactctctcttgggtgaggggtggccacggaggaacaggccagatattcaagaagtggggttggtggagttgccccccagccagatggggctacctccctggtctgtggtggccacacattgctaggacacactcaaaacaataccgtggcctccaggcagccacagtgtaaaatgttcttaatttccctggagagaaggaagaaagagctttcaattaacatgaacactggctactttttcaagttacctaattgaactgtcagaaagcaaagactttgtggagagggtgagaggcaggattggtaaattgtgattacaaagctgctgggaaagaaagggcagttgggggacaggagatgtgacagcttggagctgcagtgggcaccccagattcccgtggtggaggtctactgaaatggatagaacactttggaggactgcctgtcagtctctgcatttcttggggaggggcctgaccatgggatctggaaggcaggcaggaaggagagatgctaatatcttaagtcatccttataaaacaaagagaattttctgagaaatgatggttccttcttctcctctgctttgaagaaacataacctagtgcatagttccccaaatcttagggcagttacctaaactttatgctcatggaaacccaaaacactttttctcctaggtcagacccatttcctggcctgcttcacagtgaagtgtggccatagactcagttttatccagtaatatgtgaacagaaggatatatatctcttctaagcctggcccatcaaactgcccacactgtctgctattctttttttttcctctctctctctctctctctcttccctggccagacctattcaaagtgatcttgagatctctgttgaagatggcagagactttgtcatccttaatctctgaatgaacacatggataactaccacaaactagaaacacccaagtagcgttattggcattttcatgagtaagaaattctgtatgtaagctactgagatttgggatggggatacatctgttatagcaattagaactatttactacaatctttccccattcttatctgtatatgacttatactgtcattcattattattattattattattgagatggagtttccttcttgtggcccaggctagagtgcaatggcgcaatcctggctcactgcaacctccgtttcccgggttcaagtgattctcctgcctcagcctcctgagtagttgggattacagatgctcaccaccacgcctggctaatttatgtatttttagtagagatggggtttcaccgtgtaggccaggcttgtctcaaactcctggcctcaagagatccacccacctcagcttcccaaagtgctgggattacaggtgtgagccaccgcgactggcctactattattatttggagacagagtctcactctgtcacccaggctgcagtgcagtggcatgatcatagctcactgcagccttgatgtcctcagctcaggtgatcctcttgcctcagcctcctgaagtatctaggattacaggcatatgccatcatgcctggctagttttttttgttttgttttatttgttgttgtttgtttgtttgttttgagacagagtctcactctgttacccaggctggagtgcagtggcgccatctcggctcactgcaacctccacctccctggttcaagcaattctcctgcctcagcctcctgagtagctgggattacaggtgcttgccaccacacccagctaatttttttttgtatttttagtagagacagggtttcaccatgttggccagactggtcttgaactcctgacctcaggcaatccgcctgcctcagccttccaaagtgttgggattacaggcttgagccactgcgcccagccggccagttttatattttttattttttgtagagatgagctcttgctgtgttgctcaggctggtctggaagtcttggtctcaagcaatcttcccacattgatctcctaaagtgctaggattacaggtgtgagccactgcacctggcctattatttttctttaaatcaagttattttttatgaattttgattttaaaaagtaaactttatgtcattatcacaaataaaaaacaatatcactacaaatagaaggtaactctaaaaatacattgagtggaaaaaaaatgttattcatttctagctagatgctatttcctggagaaagttctttgcatgagacctgttgtctctgtgttgaaaaggggaaactagccactattagaaaggtgtcaaagacatattaccacaaaactgagatgcattgcttggcagaatcagaagagttgaaaaaaattgaaaataatttccccatagttatgtgattccatgctatttaatgttctgtctcagtcaccttaagtcatctggtttaccagtggtgcacatcctacccttgggagtgaagacttactaaatggagaccaggtttggctggaggcttgaggatgagctgaaatgcataatagaagatacattgtgaatcttgtaggcgtggagtaaaatgagacttctgcaggcacaggaagactagccaacctatagttcatcatttcaagtttgattcttgatatatagataaaagatttttttgttaatcaggatatttgtggtttcctcctctagtgtgttggaataagctttgaacacactaacctttccacagataacaataaacttgggacaaaatgcaaaaaagcaactacttgaaggtttttgaaagtgaaaaaagtaggcaaacaggttttgtaaagcagtgggcacctggaaaaaaggactttagtggggtgagttgtctgtttttgcagaatgacacagggcagccgaagttgtgattaaaaactcctcactttcttgtctgagtggcaagaagaaagagtctagggagcctgtggccattggcgagtgagaggggaaaaccagaaaggagagagtcagacaaggagagcccaagattgtgagtataaactctgcccaagtctctggctgattcttttttttttttttttttttgagatggagtcttgctctgttgcccaggctggagtgcagtggcatgatcttggctcactgcaagctccgcttcccgggttcacatcattctcctgcctcagcctcccgagtagctgggactacaggctcccgccaccacgcccagctaattttttgtgtttttagtagagacagggtttcaccatgttagccaggatggtcttgagctcctgacctcatgttccgcccgcctgggcctcccaaagtgctgggattacaggcgtgagtctggctgattcttgagccatacatgtgttggacaaaatcaaagcagcacagttaatggtaacagagctggactgagatttgatctgttgcctcctgcacacaagacagggtttgcagtttaacaaaactaattgcttgttaaaataaacattaacactgttcaaaggaaaataatagaatccagagtctccacaacaatattcataatgtttaggatacaatccaaagttactttagctacaaagaacctggaaaatgtgacccattctcaagggaaaatggatagaagccaaccttgagatgatccagatattgaaattattagaaaatgattctaaagcaactcttataattgagataaaggaaaatattcttgtacacataagtgaaaatatagggaatttcagcaggaaaatataaaatataaaaagggacaaaagggaaatcttagatctaaaaataatatctgaaatttaaaaaatcctctgtatgggtttgattaatagcacagtagaagtaatgaggaaagattcagtaaacctgaagataaatgagtagaaaggatccttgatgaataacggagataaaggattttaaaaagtgaacaggatcctagacctgtgggacagaatgaaagcctagtatgtgtttaaggtttcagaaggaaaggagaaagagtggaacagaaaaaatattgatgagataatgaccaaatttttccaaattgaatgagaaacacaaatttacaaatgcagaaagctcagtgaaacccagataagataaatacaaaaatgtcacaccaaagcatatcatagtcaaattgctaaaaattaaagagaaaatcttgaaagcagtcagaggagaatggcacacaacatagaaggtaactgatttaaatgatcatggacacgcatctggagctatgaaggccagcagagagtttaacagtatctttaaagttctagaaggtttgggggaatgcaatcctgtcgaacaagaaatctgtatccaatgaaaatgtcctttgagaatagaggcaaaaatatttttaaataaaaagaaatataagaaaactcactatcagcagatctgcactacaagaaatgctaaagaaaatttttaagctgtagggaaataatatgagagggaagcctggctatttcaaggagtaatgtagaacatcagaaatggcagatatctgtgtaaataaaaaatattttgttgcctctcaatttatttacaatgcatatgattaatagcaaaaactataacattatcttatgggatttattatgtacatagctgtaatgcatatgacagccatagcataaagtacagtactatggcggtgggaggatgtgttaatggaatatatggttaaggtttgcacgttttctgtgaagtggtgcagtatgaactctaagtagattgtgaaaagttaaggatatatatcctctaaaacaacactaaaaaaataatgctaaaagccatagctaaaaagacaatgggtaagttgaaatggaattctaaaaaaaaataggtggagtgtttatggtatgggtaaactaacatactaagatcgttgatcattttggtgctatgggcttgtcatggaattcatcatatctgatttatgcttccttccttcctacttatctggctgttttcattgaactgactcgttccataaagtctgttataatttgccacacttgttttcttatctccataaatatgtgagcttcatgcttatagtgctgtacattcagtcattatggtgatgaggatttggaagtttcagatggagagaaaaatacttaatacctatcttctgcagagattgtcttttcttaaagataagattctggcaaattacaaagatgactgtgggaggcttaaaagtagcccatgatatgttagtagcaggtacatggaatctaatgttcagcatatttgatttttcttaataaaattcattttgacatataataataattgccatttctcacatatctattgtgtgccaggcactctactgagaccttaacatgtgatatgtcatttaatactcaaaatagagtcaatgagaaaaaattatttccctatttgcagatggtaagtaatttgtcttagatcaaataaccctctctgtagttaatgatggtggtaggattcaaatctgggttggcttggatttgaacctcttcccatatgtcacacttcttcctgttagatgtttaccaaatttaaatgttgacatctgctttgtcatcatcattcaaccataggtatttttgagcacctgggaataataagttgcaggaagatgcatgatcgactgttgatggttagagtagtacgtgccttctcaagagcccaaagtgctacaagctgtttttcccatcctcttctacttctatcctaaaaacattacctaccctactaaaatctagtaccattcatcaaaattattcgttttttccactgtgcagaggaataaactgaggcccaaatgaatcgtattagaagagctaggtgggaaaccatagcctaggctcagacctaaaccgaggcctttctttacactttttttttttttttttttttgagacggagtctggccctgtcacccaggcaggagtgcagtggcgccatgtcggctcactgcaacctctgcctcctgggttcaagtgattctcctgcctcagcctcccgagtagctggaattacaggactgtgccaccattcctggctaattttcatatttttagtagagacggggttttgccatgttggccaggctggtctcaaactcctggcctcaagtgatctgcctgcctcagcctcccaaagtgctgggattaggcatgagccacctagctcaaccagccttctcttacactttaaatttgaatccctattctaaaaatttagtggtttaagacatgttttctgaagtgttccagaactgaactgctcctggcaaagtcaggatagtgagaggataggaatagaatctatatgagccagtcacattttttcctgtctcatctctggaatgtcatggcaggatatcagatcagtagtgacatttacaggagactgaacatttttaactggaaagatgaagagtttttaagaccttattaaaaccaaactccaatttaacttagaaccatagccttttaaaggtatgatagaatcttagagaacataattctcatattctctttttacaggttctttcaaaggccaagagaggttgaatatctactttagaggcaggacacacaattagtctttgcagaaccaggtgttctaacttccaatttgggacattcaccattttttcattcttacccccacttcatctacttcttgagctaatgagctatttgtgaagcttcccttatgcctcttgaactgcttctgctgctctcggaagtgtgcttagaatgagaacatatacattataatttaaattattggatcagttgaacaattcgtccctgcaggtcaaattcttcaattgtgatcaatccctatgagtcaaattcaaatttaattttttaaatgttttttttcaaaaagatttcatttcattctacttctccaaatagataaatgtttatttcaagaaacactgccaaatattgttagtgcttcaaatctgccagccattgacttttttttttttttttgagatggagtcttgctctgtcatccacgctggagtgcagtggtgcaatctcagctcactgcaacctccacctcccacgttcaagtaattctcctgcctcagcctctcaagtagctgggactacaggcacacaccaccacaccaggctaattttttgtatttttagtagagacggggttttaccatgttagccaggatggtcttgatctcctgaccttgtgatctgccctccccagcctcccaaaatgctgggattacaggcgtgagccaccgcactcggccagccattgacttcttgaagcagcataatttgttgtccgtggctcctgaatgttcctcatgccaccagcccttatggtggatagtacaacaccaatgtattccttggaaatctgggatcatctggaaagttcgtttctgtgggtcagacttttaattgattgttcaactgatcattccacccaaatattttctttttttttttttttaaattatactttaagttttagggtacatgtgcacattgtgcaggttagttacatatgtatacatgtgccatgctggtgcgctgcacccactaactcgtcatctagcattaggtatatctcccaatgctatccctcccccctcccccctccccaccacagtccccagagtgtgatattccccttcctgtgtccatgtgatctcattgttcaattcccacctatgagtgagaatatgtggtgtttggttttttgttcttgcaatagtttactgagaatgatggtttccaatttcatccatgtccctacaaaggacatgaactcatcattttttatggctgcatagtattccatggcgtatatgtgccacattttcttgatccagactatcattgttggacatttgggttggttccaagtctttgctattgtgaataatgccgcaataaacatacgtgtgcatgtgtctttatagcagcatcctgttttgaaatgactagcctggttctaccattcacttcaagcatcatttgaacaatttggccctttatatatcaaataaatgtaaaggaaggagttcactgactttgatgatcttaaatagttttgtcagtactgtaaatactgatctcgaataaaatactaaatgaaattcaagaccttagttgacctgctattgcactagatttgtttggaatcaaaacttatagtcttttaaagccatatcactgtaaaatagagtaaaatctccagtaaagttctagattattcataacacatagtggaaattgttaggagacttccatgccattactccaagttaaagccaacattctaagttaaagccaagtatcctgttggaatcctgttggattcaggttgtgcacagctggggtgaccttcttaaatgttcttattctagagtttgcattaaaagcaaaggaaaagctgcaaaaatagttgattagatacatctgagtccacattttagatatattgaatttgaaaagaatcaatgataaaaataggacttgacaacataactaatagttgaaaattttcttaacaatgaaaatgagaatttttgttcaattttgagggttttttttgttgtttctgtttttgttttgttttgagtttttcagttggcctatgggaagaaatatttgcagcagcatataatacccagaataatcttgaacttgccctgaggactgtagggaaaacccctacttgccttagcatgttcttggaaacaataccacaaagtgatttatgtttttctatgagaacaacattgtgaaagcagcatcttttctgaccaaagacttggcatcatataaaccatcttaccaacagtacgccataaaaacagatatgaatacaaaaagtaaaattctagcatcataaacctaagttaaagaaggtttaaattgctgtagcaattgatcattacaagaggactccctgactataacagcacacagagctcttcaaactacaacattgtgtcataaatgagattgtgtaaatagaagtaccttgcataaccctggctggtaactggtatcaggtaatgttgattgagaacaaatattaaatatctgtttgctctccaaggtgacatttctgcctctaaagttttatgtttcaatttacaatgtctacttcttgtttgtttgttttcttgagacagagtcttgctctgttgcccaagctggagtgcaggggcataatctcagttcactgcaacctctgcatcctgggttcaagtgattcttgtgcctcagcttccccagtagctgagattacaggtgtgcatcaacacacccagctaatttttgtatttttagtagagatggcgtttcaccatgttgcccaggctgtacaatatatactcttatattcttagactatgaaaaatgacttaaattgtggagaagtatgggaagaccttcttcttccagagatacctgaatagatccttccctattgaatttccatgtaacgagtcagggcattcatgaattgtcctattttcagttagttttctaagtactatagtagggactcctcagatatctgttacagtggtggatgaagaaggaggagaaggagaagtttttaaagtataatagctaacctaatcttttgtctcttccaccatctttagttaattcagatgttctccttcaatggctcatcatcagacatatacccctctcccctctctccccagcaaaggctaaccaggaaatatggaatagtatttattttgccatagggtgtactagacatctcccaagaatgctaagataggataaggctgtatcctcctgatccttcaggatgagcaggccaaaccatcaaatgatcaaattccagaatagccaatttgccccgaagtgattttggtaaagaatccatttggaatagtatttctcaactctccgactacatcagaatcaccaaggcctggggcctgccccagacactgatccagttgttctgtggcgagatggcagttaaaaaaacacacaagaactttcaagtgattgtaatatacagccagagttgagaacaattgggccagagctttcttatctgccaaataatggaaggcagaatggaggaataggggttaattttattaacatctaataaattgatttaaaatgaaaatgggtgcctcttaataataataatactgatttggtgtttatcatcttacaggcactgtacacacatgaacacatttaaactgtgccacagccttcactgtataggtgagaaaacagtcctgagtgtcaattaacttagtcataacaatatagctgctggcattaggatccagctctacttcggaaaagctcatcagtttccactctaccacaccacctctacacttttactttctcatctacgtttttctttgaggagatgcagttaaagtcaggcaagctaacatatattaccactgataacaaattcagcagcctaagtattgctgaggaatttaagtggctgatgtgtttgttccagtcttgggtagaaatgatacattatcaacaatttatttatttattaacaatttataaagaaaacagttttatcaaaaaattatcagcttgaattttatgaatgaagacagatgattcctgtccatggaaaataaatagtctgtatcctttaaataatttaaggcacatttcttgctaatattctgggtccacctatgtcttgcattgaaaaagtatttacctaatatcttaaagcagggctatgataacttagttctcaaggaaagaaggttttaaaaataattttctctgctctccatttctcttactgtaagcatgtggcaaagtcttggcatctgctcagaataaattttctgcttcctttctgtcttttagtcagcgcacgctttctctgagttctcccccttactccttccctgctttagtaatctacaggaaaccagaccttactaatttgagtgcttgctcttagaattacttattactgtattaatacatatttgctagagtttgtggaggatttgtattgctctaggtgctaataaaaatgtgtaaaagacaggccccttaaataatgtgcaattttgagggaaacaacaaaggcaaaaggatttctttgggactggctatttgcaataaattgctcatttgattttattttttattttttttttagcatgcaggaggtttattaagaaatgcaatgacggcaggattggccagagagagaagtcaagacatgatgcattctcaatggaatgcctcagctgaccatgtggggagttctaaagacggactgatgattcagagtgccccatgttgatttatcagtaatttgttttgagctgccctggaaagcgggtgtgaagttggttgagaaggccccagatttctcattttaaaatgctgcatgtgagaggacatttttcacaaagaactactaaattaaaaaattggggaatagaaccctactatgaacggagtgtgtttcttctattcaggcacatatttttgcctaatatccagatgctgtttccaaagctattttttcatgaaattgtgttgctctagaatgctcaatggttctcaaattttagtgtgcatcagaatcttaacaatgaggggctaagacacaaattcctgccctcctccctgccgcccccctccagagtttcagattcataggtctcggttgggtctgagaatttgcattcccaagcaagttaacaggtgatgctgatgtttctcaggggataacgggcaaatggtgaaacccagaaagttttgtttctagatatgagatcccattgtctttgccaatgaagctgtgctgtaactccatcttaacaagtaaccccaaattatacccacctgaaagacctttgtgggttgtggaaaacctggaagatggctgagagacagtaccctcgaagtagttctgaggagattgttctgcttgtattcccatgcagcgccatcactgcctgacttccttatgtgtgtctgatttgaggcagttctctaggaaccagttcctggtgctgcagtgccactggcagcttcccagggcttccagaaccctagtggcatggtgggaactcctgttcctcacccgacctctccacagccctggacctgtaaggtttcttccaggctacatggaattagatttccacttttccttggttcacagggggcaggagccaggttggaacggctgccaaggagactgtcttttttcagagcccttaactggcagtcagcaagaccgaactcctctgctccttggtgaatggtgatgctgattatttggaagctttagcaccaaagtttgaaattcccctaagtgaatggttttggcgatccccttcctttagttatactattggctttctctcatgttcatttaggttgccaaatcttctgtataatcctcatcccccatcaaaagagaaaaaagaaaaaagaaaaagagtagttctatttttgtggaaaaagaggaaagaatccaggaaacatttcagagaactgtatgttttcttagttccttctctccagacacgaaatccaaggagtatttggtcagttgctaacattacatgaggggcttttttttttttttaaagtaggtataaaatttaacttctctgcccacctcctgacaagaaactgtggaaaatatccagtttacacaatttgaataaaattattccttgataaaggtcacgttttcttattcataagaatcttcacaggaagatagcatggaaagggactaataggtgcccaggttccactctgattgtgcagagaatataaggcgggcccaggctgtaaggagccctcctacatcattctgctggtagaattaacagcagcaattgcccaggtctgttgtaagattaggattctgcccaccctctggagctgccaccattctgccttctctttcttagagttttgtattctaagtttttactttgaatcttgagaatagaaaatagttttcagtctcttgagattttacatagtttgtccatgagcttcagaaatgagttcagtgtaactgcttagatacctcgatttatctttttcagtttcatttgttatttttaaaatgctttaagatacgattaagaggccgggcgtggtggctcatgcctgtaatcccagcactttgggaggccgaggcaggtggatcacctaaggccaggagttcgggaccagcctggccaacatggcgaaaccccgtctttactaaaaatacaaaaaaattagctgggcgtggtgtcaggcacccataattgcagctactcaggaggctgaggcaggagaagtgcttgaacccaggagttggaggttgcagtgagctgagatcgcgccattgtactccagcctgggcaacaagagcgaaactccatctcaaaaaaaaaaaaaaaaacaaaaaaccattaagagaatctgcagatagttcctttggcagaaatgttggttaaaaaaaatcttctggctgtgcaccaagtcagtgacctataaatactctgtgctggctcttctttctcctctttgtgattcgctgggatacagatcttggactaatgccttgaagaaaatgttattttgatgataagcaaatatttcaattgattctagaattgaagacactgattgtggactggatgatttcttctagcccaaaattcattctctagattaacctcaagtctgctgtaagtgggggagaggatgccagttcacattatcacagttaccattattattattattttttggccaaaatcaaccttcatttcttagtgtacatttctatagttactaattcagtcaggctcaactgggttctctgcttcaatgctcataaggctaactcaaggcatcagccagactgggctttttttctggaagctcaagtaaaaaatccacttccaaagctcattcaaatggttgggaaaatttattgtcttgtcatcacagtttaaagattgtactctacaagggtagcaaacactatcctcgttgaccttcagggttgggactgtgtgacttgtttatatatgtgtatatttgtgtgagagagagcaaaataatgtatacttggtacggtttagtgttaactgttgggatatcagaaatataaataatacttaaagtgtactgcccattccttgtggaagaagcacctgtaagcactgtatgtacagtgtattcctttatttaatcctcacaaaagtcctatgtggtagattctattactatccccatttgtagattaagaaactgagacttaaataagataaatagcttgctcatgatttcacagctgataaatagcagcaccagaattgaactaacctctgtcttgaaaacaaagttcttatatactgtgctaccctgaggaaacttctagttgaaaaattgtggtctcatatggtcaaagcttgttgactgtgtaatgccatttctcttcctcaccaactttaaggttttttatatgagaaagggcatgggaggctgtcaccgacctttcttctcttctattacaatgctttaccttcagactgccatttttttttttgaggccaaagagaaatagaaagtaacttctatccaagcaaaacctggggaccctagatctagtccatctcaattgaaccagaatgtttcctactaatagataaaatctatttttgtttaatactatgccattccataaagacatgattattccttagcttctccaaagggatacttactgaaagtgtagctgagactgtttattcagtaggttcctaagcaccatctgctttactgagtgttctagattttgtctaggttattcctgtagagccatggtcagcattatagtaacataacagcatatatagtaacatatagtaatagagaaatatctatttttactttatcagtaataaagtattagctctgatttatggtaacaggatagtcttaaagcttatagatctgatattaagaacattttatataatgttatatatcaacattgtcttttaaagtgatggatgcttttatttcatcttttggtttatctctgaaagatcattcttttggatacagttttttttttttttaatttagagacagtttagacttcatagtgtcatgataattttcaagttggtatcaacaggaataacaaaaggaaccaagatttgaaacatctgtaaataacaataacttttattgaccaacaatatagtatgtgccaggcacagtgctaagcatgttagcacatttccttacatcacactatgagctgtaaatattgtctccacttcacagattttaaaaactgaggttcacagaggttaagtgcctgatccaaagacacataacttgtaagtggtggacccaggaagccagagcctggtacagggtattctgttgcctcttagaacccaagatttttctcacccagttcaaaaattctcatctacagtggtcagcagctgtgagaactgttgagtctcagtcaagactcacatgattatctggttcctaggcaagggttaaggccatgccaagagatgtgaagcagaaggatgtggcagattgactggtgtgatatggggtgtggtgcccatccattcatgagtgccacatagccgggagggaacgtgcgagacatagattctaattcaaaagggaacagattccagatgggaaagtacttggctaattgtattcaagttagctcacacttatagaactgtagaactgtaacatttcctgagggcaggagtggatggatctttttctttatggtgcatgaactattagtaggtatgtactgatacctgggggagtaagatagattctgaaggagtctagaaccagactacatgtgtttgaatcccagttttacctcctattagctttgtaggtttgggcaatttaaataatctctctgtaattcagttcatctcatctgcaaaatggagatgatcataatacccccatgtagggttgctgtattaagtaaatgataggtgtgaaatgcttagaacaaaggcatttgtcatcatcatcatcatcgtcattgctattgtcaaaaaatgttaagtgcacttaatagttgccttggatagagcagctcaaagccctgaccaaattatgaaccattttgagagtcattaaattagcagtattggaaatggatgccaatagccagagttggcaagggggtggctatgtggcacaatcatgtatttgcagtgggagggcaaatcggtataattcttggaagatcagttaggagagctgttatcaaatatcctaaaaaagtataagtcctttgacctaggagttctgtgtctaaaaacaatttgaccaaaagcctaaactgtctacaaggatgttaaatgaagatattaaaaatatatagaattttatgtttatggacatggaaatatttgaaaacaaagtaaatagaaaaaagcaaactataaacactttataggaggatctcattaaaaatatgtcttggtagatatcttcagatgacttttgttttagtttattttaaagctagaagtaatagattaacatcccactttcaaaatttgtttacctttaggttttttttttctttttgctagttagacatgattttgtccaataatgtctgcatataaactcttcatccaaataccaagaattaggaaatcctgctagaagacttgttctcccctaaaaagaagaattgtgtaatgcttcctcatcagcctgcctgaggtatgcaacaggctccaatcaataatagtgctcagtactgtacaatttctcactaacttggggcagtatcatttaaaaatatccccctccaccctgaaattctgatacaattctataccctctaacatctcatatccactgagaatcccagatatggaataaaagtttttgtcacaagcataagttcttttgacagtcaagtggtttctgtgcagaaagacctactgtgaactagctaatgctaagaggtatgattgtttgatattaattcttaatacataatttaggcaaagtcaccccttgtcatttgggaggatactcctgttttttaatggtttccttagcagactatcacttactttcctatttggtcttcccatgaattggatttacctccaggttatatggcaatttaaaggattgtgatgagaaagaccaaggtcatggcattcagactagtgtggctttttttggtttctttatgtttttaaattttttttatcttttttaaaaaaataagtatctataggatatctttgaatgcccagctgctgagtctttggcctagaatgctgaatacttatgttgatgttgataagcttcattctcatatccacattgagaaacaagcagaaattcattgttatgtgagcatgtaaaggctgctcttttttggacagcatgtagcaattaaaagacaagggctgggttcttactgtcatctgaaaggttaggagaattctagtctcatgacagactttttccattattgtgaaagggagagagggatcttgtgcatatacccaactggggcccacaaatccccttttacatgtcccagtcagaaaacattagacactaggtctcgaggcatgtcatgttcgtccccatcgggtgagctatatgtgcatgagagaggcagcccccaacttagaacctgttttgttgtgtttgtttgtttgagacagggacttgttctgtcacccctgctggagtgcagtggcatgatcatggctccctgcagcctctaatcctgggctcaagcgatcctgccaactcaacctcctgagttgagtagccacaggtgcacagcactgcatctggcttgactctttttaaaaagtcagcttggctatagataacattttcccagaaaattagtgtttcaaatcagagatctgtaaaccttttctataaagggccacatagtaaatattttaggttttgcagtctgtaggtctctgttgcaactactcaactctactgttgtagcagaaagcagacttacacaatatgtgaacaaatgtgtgtgactgtgttccattaaaacttcatttacaaaaacaggcactgagcagggtttagtttgctaacccctgctataaacaattattcatttcctaaaccagcccacagaaactcctctggtaagttgctgatacgttgtacatttacaatattattttctctgaaatttgttttttttttaatcaaaatagtgttaggccttgtctaaaagtaacacatttctaattaatacttcccgaacctgttccccaaaagcaactacttttttctcttttagctattctgaatgttatcttcaaatctcaatgaaataggcttttattgttgtttcttaatttattagtgtcttagtctgttttgtgctgctataacagaatgccataatttatagagaaatgagaataacttataaacaatagaagttttttggctcacagttctggagcctaggaagtttgagatctcaaggtcaaggggctctatctcataagggccttcttgctgcatcataacatggctgaaggcaccacgtgggatgagagtatgcacaagggagagaagggaagggggccacgtttatcctgtgtcacccacccctgaaataatcactttaattcattcgtgagggcagagccctcatgacctaatcatttcttaaagcttccacctctcaacagtgttgcatgggagattacatttccattgcatgaacttggaaggacacatttaaagtatagcaatctaaagcatagactttctgctaaaatagataggaatttagttttccgatatcctcacatgccaatttctccgaacacatgatataatttgttttttgtttctctactttttactgcaataaacattcatagtttaaaagtttacttcttaagtatgcatcttgatgaattttttattaccaaacagtatcttttagattccctactttgtaaaattaggctcttggcacccctgcactctccacttctttttacttttatataatacagatcatgatatttcattttattttgtaagtacatttaagtctttaagctttatcaaaaggttaattctaaaaattgaaaatcaataaatattatttgtgacctatttatagtggagctaatgatcattatagtttaattttcttgttcgtatggctgtttgtttttatggaatttccaaatgccattttcccttatgcttttgaccctttaatcacagcttccacttttgacattttccgacatccaagttcactttgatggagttttttcccagcccctcctccacaggttcctccatctttctgctccctaggcttgatgcttacctgtcactctggaagttcctccttcagatccactggttcctgaaaactatcctgtcttcatttcaggttcactccttcattttggttgtacatatcttcaatgatcttcctataaaagggtgtggaggggctaacttttcttagtctttgaatgtttaaaaatgttttgttctattttcatctttggttgatgattaggatgaatatagaattctaagatgaaaattattttcgtccagctcctttcttcagcatttgtggagtgggtgttgagaatggagtggaggggaagagtaacttctcagtaggaactacatttgtctgcagtcttcaggcttgctcttgaaaagtctaataccattctaattcctattcctttgtagagggccagtttctttattttcctctatttttttaattttttattatttatttatttatttattttgagacggagtcgcgctctgtcgcccagcttggagtgcagtggcacgatctcggctcactgcaagctccgcctcccgggttcacaccattctcctgcctcagcctcccgagtagctgggactacaggcacccaccaccacgcccggctaatttttttgtatttttagtagagacggggtttcaccatgttagccaggatggtcttgatctcctgtcctcatgatccgcccaccttggcctcccaaagtgctgggactacagattttcctctttttatatggaaacacattttatgataacttcaaattctgaaatcaagtcataattttgtgagaaattagaatcttttctgattcatccttctatttaattttaaaaataattttctattagtaagattttttctagtttacttcttccattttcatagcattctcttcttgttttatggttataatattttcttggctctcttttaaatttttgaaattcttttctattgcctgtcttatgtgtatttccttcagaactatttcctccatttattcatctcatttgtattctttcttgttggaggctttcttcatataactggtaaccatgattggctattcataattaagagtgaagccattaaacagctgccttgtgactctctatgtgggctttgttttatgatatttgaatgagttggtgtctgaatgtgctttttctctgaatcttccaatttctttttaaaagattgctccaaatttctttttgtatgtgtgtgtgtggttgggggtaggtggtgtctgggttgatggagaggaggagagggaggagaaaaaagagagattattagttggcagaatggagaggggcatagggtaggggttaatgattggttgcctcacatacatgatttcagataatttgtttttcctgcctcacagctcatgctcattctctggccttcgaagaatctcaagttttgcccagttttgcaagattaattgggtcctgcccataaatttctacactgtagattcttctgccctgtttcattaattatcacccttccattttgtctcttttagaaagaggcttatttggacctcctcaggatattatgccattttaaatttcttaactcaatttagtgaggttgattaaagaagagaagatcaagatcaacttgtgtggtcaattggtagtcacaatattgttttctacatttctattttgaattattagacaatattttattctgctgtccattttatagctgcatatatgttggcctgccaatttaaccttcatctatctgagaattacttgaaactcaggctgctaggaccatatttctatcttatattataacatttttatattactttacttttcttaacttccccctcctggcttgtgtgatgcttggctgagactcaaggggctgtagaagatatcttctcattcattatgcagccagtagctatgagttgcttctgaagtggtttccagtccttcctgggctcggtctctataagcaacctgagagagagtggctcagtttatctataactctgacaataaattgtattttgataagttggagtagcttcatgtgatgttccttgcttttcagccctgaaaaatccagacatctcagattaattcttgagaattacagaaaattggaatgaggatgttcatgtttcttgtgtgcctttccctttgttaagcgttttccttgtatgctaaagaatgctcacaggttggtcttcctctgggatagagggccctggggctcttgtttcactttaaacacagaaataaacatttttgaaaatggaagctaactcactttctcactccaatttcatattgctccttgtggatatatgtctatattctgtaagatgaggtagagaaatcaggatattggggtgacagtgcttaatctcttaggaaaacttatgtcttcattgttgtttcaggcttcttcatgaaagtttaaagtaaatcaggctgttaattcacagatattctcactctaatgtccctcctggaaaaccaaaacagaacaaatagtttgcaaggttcattatcagttgtcatgacatctcttaccatttctataccactttcttaaggctctattcacatttttattttttaaaaaggtcgggttttttgagcaacataaaactttgagtctcaagttttgagactctcagagttaaaaagttattaagctataggctgtggagagggggcagatggaagaataggactcgccagtgatcatctctccacagaaacattaatttgaacaactatccatgcgtgaaaataccttcttaagagctgaggaaaccaagtgagagatcatagtacctggttgtagcataatatgaaaagatgcattgaagagggtaggagggacagttctacattactcacttgcatcacccctaccccagccccaggcagcacaatgcagaaagatactgtccactttgggaaaagagagggaagtaagcacaagactttgccttgcaccccaacaccaggcccactacagtaaagcccagaaccaggaaggcctccatggcccaagactatggctggtacccacagattgaacctccagactcaccttggcatcaggtgggtccctgtagctccaggctttagacttttgaggcagacttgatctctggtccgcatctctagtgggctgactctagcacccctggaatttagacagttgtcagcagcacagaggtctcagtggcctgggtctttcagcttgctctggtgctcccctgggcttctaacttgtgtgagcgccacactggccctagcagccatgggcttctgatcatacatcagatgtcctgaccagaatctctggttgggctgttgaaggtgttcccagacaaagccaatctgtgaagactggaatatctatttattcaaatgcacaaacatcagtacgtggccataagggtacaatcagggaaacctgacctcacccaagggacaaaataaagtgccagtgactgacactaagaaaatggagatatatgaactgcctgacaaacaattcaaaataatggttttaaggaaattcagagaacctcaagaaaacacagaggaacaactcagtgaaatgagaaaaacgataagtaaccagaatgagaaatttaacagagattgaaataaaaaaaatcaaattctggcactgagaaatacaatgaaggaaatgaaaatgcaagacaaagcatcaacagcagaattgatcaagtagaagaaagaatctgtgaatttgaagacaggttatttaaaaatgtacagtcagaggagaaaaaaacaaaagaaatgagaaaaacatataggatttatgggacagcatcaaaagaccaaacggacacttcagggattttccttcatggctccccaactgtctcgatgtgtacggtgccatcttaggaaagaccccttagcaattcatggctgaagagctctagctcataatttaaatgtgaacatttctttctcaggcctggcttctggatcttggaattctccagagattgatactgcaattgccttctctgtcattgaagcccttggtacccacaccttgccctgcagacctcaacaggaggactttgttagtcccaacaccagtcatggctccagtcgggtgggatgggggaaagtcaaagacagtctgtaagtgatgcatgtgtttgcatggtggccaggaaccagcagaggaagctagtttgtctattcttttctctcgctgtcatcacgtagtgcctttaccatctccgggtggtggctataatcatatggactccttctatggacccagtttcctgaacttcccagaaagaaacaattcaacaattaagtttaacaaatgttttgggtgcctgttgtgtcaaggaaagcacataaagcagactttaattctttaaggggttcaggcaagaatctaatgctcaaaggtaattctgagaattaaacataattggaacttagttatttaaatctaattttttttgtaaacagatgtgagtcctagcatcttacatgtcaattaattttttcttttaaattcgggtttgaaagttatatataataggttgtagcacactgttctaggcacatttctggatttagacatgattaagacatggtccctttcctttaagaacttaatacatataaataacaaaagtcaaaacagtcataaatattttaataaaatagctttcccataaaaagtgctctgggaacacatgagaggtagagattaattttgagaagtgtttttatggaggaaatggcatttggttttaatcttgaagaacaagtaagatttgaacagatggacataagtgtttccagggtgaaggcccatctttagcataggcttggagacaggacacacaaggtgagttagagggtgtgtattggataggtcatggaaatgatgtttgaaagttgtctggatcttcttgtaaatgagtctcggtaccaggcaggggagcttgaacttgatgtttatgatcttggagtgaagccaataattactattttctttttaaaaagtatctggctcttagaaaattctaagaataatgcagaagtgcaagtaaatgctagaactattagagttggcaacacaggtaggaaacgtgcgcaattagaaaagaattgttgcagaacttgaagactgaggtttcaaaccctggcacagtaagaataagcttgtccttagggtaagccagaacccaatctctccctctcagatgtagtgagtctctaccatgtatcaggcagtgtactcagaggatgcagagtgagtgagaaatatccctgaattcagcttagcagtagagccagaaaggtaaacaaatgagtgttgtattaaatgcacttgcaaagtaccattgtgaaatgaaataacaggaacaataatgactatcatttaaaatccacttgttatgtgccagactctgttgtaatcactttacatctgttaactcatttaacctctatgaagcaggaacctttattatccccattatgtagattaaaaaactgaggcactgagtgtgaagtaactttcccaaaatcatccaactagacagtggtatagaggtaggattcaacccctattttttgtggctaacaactatacctgtcaggaaacagctggggcagtaggcaggggtgagagaggagtgagaaaagatggggatgggtatttcaggaaatgaaattaacacatgtaaaggcataaggagaatttgagaaagatagttggcgattagagacgaattttactttgggtctgatttcaattgctggtgtgatatttaggtgggaatgcctcactaacgatgtgggtatttttggagaagtcaccaggcattttctctctggcctctttcctctccatgttaacagtcgctctatagtggtgctccacatacattccatctctgtatgaacagggaagtagctgtcagtgaggaagatgtagtactgtcttctagccttttcctaagtggtccaattgctcattaagaatccactccaacttagtaaccaaacagtattgtaaatattgatactacgggggtattctcatgacccagttgcccccagcccttaaggaacttaaaatttagtgagtgacctacccaactgtggcagtatctgagtagctccttctaaacttagaaagatggggttaactaaggataaataattatcttcacagtttccaagcagaaattgaactgctcaaagtaagtgtgtaaatgtgggtgtatatgcatgtgtgaatatgtgtgtgggtgtgtgagtttattttctattgagatggaggaatcataggtaagtatgactgatctcatagatgaagaagtaaaaagcttcctagttattcagtgtacttaaacttctctgaaacttattttaggttaatgaaggaaaatatttgaggttcttgccttagaagaattgccttagtagtccctcccctaaaatgtttttattctgaccttgatgcaagagtcagtaaagaccatttcagcagtgattgtcacatatcaccttccctctaaacatgaagcaaagtgaaactataatctctccagcataggctgtttcagtggtctttcatgtaggaagctctgaagtaacaccagccccagctgtgctttttgggataactatttcataataagaaagaaatcatattttgagacaacagcaacaaaaagctgatattgtgtctgtggttctgttttgagtgccaccactgaattaaagctatccaaggaaatgaaacatcgaggttgggggaacattgtgtgatgtatgttggctgaaatactaaacactccagtataacatcaatatataatttgtatggttacaaatattattggcataaataattcatgctgctgctttgtatttacttgattaacagcgtctttgtcatttttgtcagtcatgatgccattgcaatcttgcacattgtgtttaaagaatactcggggaaatgtttcaactgtgtgtctggatggtataatgtatttattcatttagtcagatgaaatgaaagagagagtgtttaatatgcatgcctgcattatactagctactctctaaataaattacagacagtattactccctttcattgtaagaaaaattatagtttgatttttttcaagtagccaacatgctgccattttgtacttttaattacaaatttttgaggtttttcaaatgagctttgaataatcctgaatatttttgtattgagatgtcaataggaaaactttggtaacttgagtgggctatatcaagtgagaattgaattactctgcaaaagaaggtaaaataagttttctacttgtgggtgaatatacttctggaaagtataaattcttgtgacagagccatgcctttgaatttgcatcactccatgtagcagccgttgttttggctatggaagtacttcccagagctgccaactgtaacttcactggcattgtctattttgtccctcttccaattctctttcctacttcctggagcctggacctctggcctgtccaatgccttcccttgcagcacaccacccagcccttctttctttgattacctttccctctgtctttctcccaaaagaaaactccattcctacagctagtctctgcttgaggttagatttcatggggtgattgaagtaattcatgctcaggtttggatgactggtatcaaagaaaaccagagctggacatcagttaaagcagtacaaagagattttactcaggacctttgcaatatagggaaagagaccttagtatagaacagggttcaattctgaatacaccaagtggcagggtggagatttaaagccaagtagcagagtagggaggtcaatggatagaaaattactaagggagtagggataattcttgtttactggcctcacaggattctggctgaaggcaggctaggatgatcagatattacgtgggggatgatgggggctgaggaagatgatcacatagcaaaggtgagggattctgcctaaaccaacttgtcaggactcttgctaaaattaggcaacataaagacacacacggaagtccaaaagtcgaggcctggttgggaagaggatttagaagagcctgactaaaagtttggtcaatgagagactgtatcactgggaagcataatattctatgaggaggggttgtattttaaatgaggagcaaatcaactcccaatcaggctcaagttttgagacggttttccagaaggactcctcagagtgtagtcttgatgtggtgcaatggaagggtcatgctgaatttcttctgatgaagaatgaaagggtggctgaggctctggggccatcagcaaggcttgcaattggcagggagtggatatgaggtctttcttgaatattgttgaatccgtaggtcctagtacagaccctggcataaatggtgggagctcagtaaacctgttcaataaatgaacgagtttcacagatgaggaagctgacacatggagaacgtggagaactttgctctgtttcctttcacatatcagttaggtaaaaagttgcctttatttctcctgccctatctaaaaggctgtagtcactagataattgccagtcctttgctcatggatggcactgtaatttatccttacgataagatgttattaataggctgatttccatataagtatttagtctctggaatcagaaagatgaggacaaagcattttacagtcacactagcacatttttgaactcacgtccatttcccatgactggaacattcagcttatgaacatgtagccaatggagagaaggataaatcagacctgggagtctctgagttttgacttcaggctcctttcagtcttgccaagctgcttttctgaattaagtatattccctttgctgtatcttgtttcattttggaagagactggccctttactttctctcagaacctgctgaggcaggaattctttggtactgtattgaacaaagccaggtaaagagagcagcccttacaccagcagctttggctggatttctgagaacctcttggctcttcttagcaagatgtcaattctgtacttaccagttcttctaccgtgactcagattgagtgaatactactataaccctaagatggttagatcaaaaactctcctgtaatttacattctgaataataatttttaaatgaatcctttaaaaaagttaaatgcatcctaagaaatagaacatggatttatctgtgccagtttcttatcaagaggaaaaaatttataatgctgaaaatgccatttgccttgtctaggcttctcattataagagaggcattttacatggcaatctgagagtgaaatgtttttggattttacactggccaggctgttctgaacagactctgagtgaaaatagtcaaatatgataatcatctgctttggagaacagaaggaagccggtttaacttaagctggactgattttttaaacttggaagacactgacttctggtttctcaagaaaggccagaggaaggaagtgttttcaaggcactctataattttttcagattgttttaccaaatttctgcttggttccttttgtataaaatgtactctattcctgcaaaggctcaggttttcccatggaagcatgcagatttcacaactctgttgaatgagataacttggcaaatctcacagacgtgcagtggagcagagtgacataatgaggtctgaagaccctaagtaggcgtttcaaatgcataaagaggagcccagtcattctctgtgtgcccaggtgacagcctgggttgggggcaacctaaggaagagtcattcctctctactttgagaaaagatgaaaggaaactgagagggaaagattcctccagaaggtgtttgctttgttttcccactcttatgtattagaccctaatgtaggctttttttatttaaaataatattggaatcctttatctccttagcagttacctcctgggaagggtggtgaatgacaatttaattcctggaaatgttagcagcttacaatacttttgtttcattttctaaaactcaagtccacagtcctttgtcaacaatgatctcaactgtggaagagaaacttttcctttcctgctattttcttcctttttctcttctctttcctcctatcttccccccatcttttcttctttccctcctttttttcctctctcaaccctgacagcttcctgggcccgtgccgcatttacatctgccaccttttgattctagattgcatttggaagtatgctgggccatgtcatgtatctgaattggaggtgccatgacagcctggccggctatgtctggggaccccaggagccatgggataactgaacagccaactgcagattcttatttgataattctttcccttctcatgattttaaaaaggaaaaaaaaataatgcttatttaaagcaatcactagtgactcagatcaaccctccttaggactcaaccactgtccagtctctttttaagattccactttccctctgtttccccagtaaccttgattaattacattaatattggcttatcacatccctggtagctttcacaaaatgaatcaccttacaaagataattttaattaccattcccttgcaacctttaaccattcttgcatatgtattttgttggtagcatctgcttgaattgcaaatgcaaagaaattaaacactttaagagtggctttcttccagttttgtttttcaccagttttgaaatctctgtctgcccaaattaatgcaggtctgagaccactcagttcatgtaactacctgttgtgtcattaaagacaaaagaatccagttccactgagaaggctcttctagcctgtggctcttctaaaaagaagtcagtgtaggttttgaaaatgagcatccacacatctttaaaatgatcattgtctgcttagaaatcctatccaaattggtcctaagtcacaattcctctagattttctcctattatttgaaatattttcagtttttgattcttcaaatggcaagcagctgtgccaattttcttggattttgtcatttgccagctttttcttttgaaaatacactcatgcaccatattctgcttcctggtgcctacatttggggagtacccgggttcactttcacattctcaaattgcatgagaaatagcaggattttcccttcttctagtagatgcctaatgagcactcattttgtgtgccatgccatgccacgtggaacttctggtcaaggtgttccgtaaggaaagggtgactgttctcagtagttggcagcctactgggcctaatacagcagcctctgaagggagccccgccacccactacctctctcatggcaggggtctgaaataccatgggtgaactcggagaacattccacagtgtttctgggcctctgtctccttaactgtaaacttagttcatctaaatgtatctccaagatccccttaccattgcagggctatcgcttccttcttctgtgttaagagattatccccctttaaaacacaaaattgtactttaagctgtgcacattcattgattccacagcagaagcaagcttatagaatttctaatttgagagcttctggagagtgtgagggaacccgggatgggggccttagaaagcacctgcagacaaatttccttctgtttcacactgctcccaagtactgaccagcctgaccaacatggagaaaccccatctctactaaaaatacaaaattagtcgggtgtggtagcgcatgcctgtaatcctagctactcggggggctgaggcaggagaatcacttgatccccaggaggcgaaggttgaggtgagccgagatagcaccattgcactccagcctgtgcaacaagaccaaaactccgtctgaaaataaaatatatatatatgtgtgtgtgtgtgtgtattatacgtgtatacaatttggtacgcaatgtctatatgcaatgatgtataaaacatacaattcttttcctagaggagtgaatagtgaatagtaagttcagtgagggtcatagaaaagtgaaaatatattacagtatttctgacaagagccattattagaggaaagcccaaaggagtatgggaggccagccaggtaaggggtgtatatatatatatatatatatgtgtgtgtgtgtgtgtgtgtgtgtgtgtgtgtgtgtgtgtgtgtatgtatatatatacacacacacatatatatacacacacacacacatacatatataaaataaaatctcacaaactccgtagcatgcctcaggtgacctggtcccagcttttacctctctagctttacagctccctgcctcacacccagtactccagccttattaaaacatttgtgttcctgccagtgtgccaggcctctgcccgccctgccctccataacctcctccaagtctcagtttaagggttgcttccataggaagcctttcctacaccacttgctccatcctagggtaagcaccccttacctggctggcctcccatactcctttgggctttcttctaataatggctcttgtcagaaatactgtaatatatttttacttttctatgaccttcactgaacttactattcactcctttaggaaagaatttttcctaaaggaaaaattcctaaaggaaaagtatgttttatacatcattgcatatagacattgcctaccaaattgtaggtgttccataaaaatgtgtcaaatggataaatgaataaatggagattttttaaaaggcaacatcattgaaatttgaaaaccccctcctttttttctctcaaaattgttcctctctgttgacagagttgcagtctggtacagtcagtgtaaacgtcttatttctcctaatgcccttccttaacctgctctgattcttgatttattccaaaagttaaatttgaaagcctttgggcatgcaaatcccaattcatatcctcctatgaacaaaactccctatgagtctctggtcacctggcagagttttttttacaagtagcatcacatatgtcaacactggctctactaactaaaatagcactaaaaggtgccttggtgagaatcccatactttttgagctggaatagaccttcaagtttatcccaacttgcttgtttttaaggctgggaatagcctggtgaattttcaagatgacagcagttttcagttggaaggcttttagcttctctttaggctagcttacctggacagtcaatatggctttataagttctatgtgtcagatacaggcatgataatgtccagcactatgaaaagggctgtctctttctatgagtgtttcatcagaagggaaaattttccagacacctccaatggatttttgcctcctacttcattgacccatacaggtcacaaccaccccttaaaccagtcacttgcaagagggctgggattatcaggatagaccaggatttaaacaaaaaccagaaatagtgtggttttattgaggcatggatattagaacaaaattgaggttccctcatcaaggaagaagggaagaattttttctggtaggcaactgactgcttagtaaaaaacgaactggcatttttttgcagttcttcataagtatattaatacaactgctttccacagtgctttaaccacagagctttgcaaatgccactcctcttgagaagccaggaaaaactactccaagattaggaatgggcagctttatttctcacttgttgcttctgttctgaatgcctgaaagaagttgcttccagacattgatcttttatctttcagagtattttaaggagctgtgtagaatttttgtttgatttatggactctgggggacaagacaaattgagatgtgaaacaccagcttttgttctttctgtcaatctaatcactttcagatgaaagtgatgaagaatgacattcaggctgatatcacagaggaggtggagtggggtggggtggggtgtgatgtgatgggaggggtacatgaggacaggcaaacactaaatctggttgttttattaaaaaggtcagtgaaatcaaactgagcagacagtttttctaaacaaaacgaagggaaggtaagcctctaggtctaggtcagtctgccctcactctagcatggttcatcagcacagttgtgaaaactcccttggagaggtgagcagagtgaggccactgtcactatcttgctcccagtgacccccagagtggctaaccactgaccccgctgctgggttaggattgaaaaggttataaataatagtattcatatttgatcctagttgttcataaaacctggcgtcttgttatccaggaaacagctcaaatgtcacctcttcacagaggatttttctacccaaaccaaagttttgtgtctcctcccggcaaaccatccagcccttgtgttttctctcctgtttgattctctgaataacacacatcattatctgaaatggtctgcatttgtttatttatttgttcaaacttcattagaagagggtgcctcgcccattgctgtagccacaccacctgaagcaatgacccataggattgggtgctcagttgttgaatgaatgagtcatatttatacaaggaagtcatactctgtacaggaagacaggaaattaaaatagatttctttacactcggaattatgacatggctgtttgccttgattttatcaaaaatgatattcatttatccatccatccatcatccatccatccaaccaacaaacatttcttgattacttaccaggaattatcattcctgctggggttcttgtttgaaagtagattgacatttagtagggaagacaggcatgcaaataagtaagtgggaagttgtgactaaaattatgtataaggagaagaggaagcaatcgattttgcttggggagaaatatcaagaagacttgaacacagaaagtaatgcttgggctggatcataaaatatgtatgtctgtttactaagcaaaaaaagggaaggcaatcagcatgagcaaaggtgtaaagatgtggcatagtatagaagggtgggagaaatgctatagccacaaagggcaagagagtagccttgtatgggtgaaggtgggaggagaggcatggcaccaaagctgaggctggagaccaggcagaggacctcaatccttccacacagtaggcttttgatagaggaagaaaggagagccgacaaaatctctttgaaatgtgactcataagcttttaagtaatctgttgctagtggtgataggtttttattaaaatacctaatgtaagataaacctttatataagagaaactttaggaaaatatttgaaaataaaatttgcaatatttcggtaataaccctcgttatcttgtgagaagttacttaggaatagctttaaacaactagctttggaaaaacatcctatttgaccccaaggaattttgtaaagcattttagccattaaaggaaaggaaggttctattgagtttttaaaatgggctgtgtgagcccatttgtttaaactaaacactgaagtgtcttaggttttaatgagcctaactgaaaatttagctaaaaacaactcattggaaaccagatggtgcagccaccattgtgagctgagctcaaaccccttgttttctcaagagcatgtcaatttagctccacagaactcatagtacaaagatgctattaattatgggagcctctgtaccctagtcactctctccatccaccccggccaaatcaacacatccttcccctcttggaaattaatgctttcattaaaatgtgtgtgtctcttggggaggaggtggggatgggaagggatgccatttccccaggttttcatctgttagggaaaaaagttattcagtgacactgggaaaagcacagtaaggcagactttattcaaggtcattgggagaggcacaggaaccattgcaatagcatcttgcagcgggagagaaataatggcctcaattttgaatacagcttgagcaagtgggaatttatagcctaggtgctgtgtgggggttagcaggtggaaacctactaagaggaaacttcaggattaagggggattctggctaagcaacctaacaggactcttgctgaaaacaagcccgggtgatcagacatcacctggggcatggtggaggatgaggaacataatcagataacagggattatcagctattgaggataggtggttctagctaaactgacttagcagggttcttttgctaaaactggattttacaaggaagtgcatagatgggcctaggaggagattcagaaggctaactaaaggttggacaagcaaaggattgtcacatcctcttatatggcacgcaacagccaagctctgcactacagattaataccttgagggctttagtaaatgagggcaagaagagggatgtaatggatctcttgaagagcactgggtgagggacagacaaggacaatgaaacagacaatgacagagttcagaattatgattccatgatattataaagggtgcctggcttattaagaggttgtgcttttcagttgtggataccactttccagttttttgccttaatttctattaattctttaccgttggccatgagattagccaggcaatttgttttctcctccctctttttgtatagtaatctattgggttatttctttccatttgtgagtgttaaggtctttccaacgtgagggtgaagcaaaatgtaaggcactggaatcctttccaccttctttgttcaagggcttagtgttagaggctcctcatatcttcagtggtcctgactggactcctgtgaggggtcagcttctaggccaccaggcagagtgttcaggaatagttatcaattgccaatagacaactgctgactcttacttaaccctaaaacctgagtcttatcccatcagccgtgggtgcgttcctaatggcgactcttgaaagattcatgtggctgccttctggttaaaggttatgtttaaatattaggtctgtccttccaactttttgtcaacactctgcctgaatgtaaagtccaggtttgagatttattcccccaacatttataaagtacacactatgtgccatatacacacacacatacactctctctctctcgtgtgcatgctctctctctctcttatataaaacacactgtccttgactttgtgggatgtaagctgtgcacaggaaaatcacaaaatgtagattattacagcacactacaaggttgatagacccatgaatatttgtaaggagaagtcaaatttcagtggcgtgtttgcgtgtgtgtgcgcgcacatgtgtctgattattttatgtgtgtacatgagagagactgaacttctgagcagtccaaggagtaaattaattaaattggttactgggattataatgagattatcatcattgaattgtcttagctgatacttcaccaataggataaaccccacttccagagtttcttagagggtcaagtgaacaggaagaaaaattatgggaaccaggtggagtgggcagaaggagggcaggtcctggcatggtgtccctggaagaaatggagcgaagtcctaaattgggcctgacttggaagagcttcctttttatctattttaagttgaaacttggctgaccctgaccaagaggagtctggacttggcttttctttactggtctcgtgggttccttatgtagttgctacaggcagttgtgaggagagcctgttggcattcctttctttgattgacatggggcattggaaaaaggtgaggggaattagaaaacagctagaagaagaaacaaatgagtcatcctcccatctcctaggcctttattacttgcattttctctctgaaagttgattcaggtcagtagggaaatcattagtgagatagtgtagctctttaaagatttcttacttattgatgctgaaggccctttgtgatgtgcattttctttgttctattcctccacagtggtaggagttctagataaaatattaatcataaaggtttttaaaaatcatttccaattgcacagagatattaggagttatggccacaaagccttggtacagctatattttactgcccacgtgtcttcccagagatgacacatacgcttttcattttgctgtcattattcttcatgagatcgcagggcatccatcatcactgtggtggaaaaatgaagatgagggacaaaagcaccagtctctaagcacaagatgatgtgtttgtctgtagtggctagggacaatctccaaatgcaggaaccataaaaggctctgtgacttgtacctcaggaatgagattcatcagcaatgaaatcagaatctcaacagcagtttgatattgagggattttgagaagctgtgtctctgtccgcatgtgtggaattccatccccacgggcagtgtaatgccatcagaatctgagctgggatgaaaaagtagcctgctctccagaaagtcacatcaagtgtggcttagtttatggcaaagatgaatggggtgttgatgtcccaagagaaggggatcttggcggacagtgcttttggctctttgttgctggtgggaaccccagctaggctttgaaagtggcatgggttctcaagtacctgacatgttcttcatgcttttattgacgttagaatgttgttttccattctgagaagccagatcacaaggacagagtgctgtgatgagcataaatactatcaaacaaggtctacagcaacagcaatagttattatgtcatgaacatctgctttgtatttcacaaagactctgtcccagttcctatctgagatggggagatgttattctcagatgaggtgactgaagctgagagtggttaaagtgtcagggtcacatgtctggtagggttagagctgaaatttggactcctgtaatgctaagtaaatttgcatgctgccatgatggccagttacatggaatcatttaaacctctttttacattaagcctgtggaaaatgaattcccagttctagagtaccgcctgccctggttctacagcatggttccttgcttcttctaagtctctaggaccttggcagagtagcatacagtggtgagcagtcttcttttgagatgaaatgggcccagggctgcctccttcatgacttcattgttcctctctcggcctgtttctgtgcagccgcttgtcatgtcagttccactttaaaaccagagtaaacagttcttaataggtgctttttaagtttaaagaaagatggaaaggatgttcagacctagggaagtagacctgtctctcagcaggtgagttattctgctcctgatgtttttataccaaactgaaaatatacagtcacacactcacccctggggaagtgcagaggactctcttcatggggggccagtgttactcttctgtcctgagtgagcattcagtttattttgatccctggcctcaaactcaaataccctactgcagtcaaaaagaaactcccaagtcagaatggggatggtcagaattcatccattcctgccagtggtaataaatggcttctcttttgggtcagtaggaagtaaattggatgactcctcagctagtcaccctttgtaaagttctttctgaccttgaagcttagaggaaattggctggagggcaaaacagtatttcctaaagtgtttatgaagtagctccccatgattcttcatggccagcactctgtcctttgtatctgtggctttgttttttagtgttcatgaagtattggagaaaagagttccccaggcatctcgtttggttaagaagattgcatctccccattgggacatcctggctatttcccagcaaaatgctctgcctccctcgactgtaccacataagctaattaacctctttatcgattctctttctccttattttaatttcagctggtatttctctaggccctgggccttgggaattgtagactcatttgttgaacttctggcagtgtgaaaatttctaatagtttgctttctgttcccatgcatagtgaagtaggcatcaaagaaaataattgatgaaaaaaaacaaggcttggaaaaaccccgaaacaacagccatgctcaaaagagggaagaggaccattgggtacttattttttttttccttgttgggagctgttttccttcttttccctctgtgtggcaaagtagtaaatggtcgtcttattagctgctcagaatactttattctataattctatatgtttctgtggttctatacaactgccttcctttgagttcctcctggagaactagaccccttcccccatcaccactaagccatacccacaatcaatataaatccaaggagatgggatgaatttcaaaaccatagagggcctagaaagtagagaaactgttgtggcatttacggctcttcaatgtccttccaaacagaagaatgtttctgaaacactgagcagcagccacacctggggtctctaaaggcactccaggatatgaaccatgacacctgataatgtgcaacaaaatgagctttgttcttttgggcctgtggcacaaaacattcctttgcccgtgttcaggcacctcagcttgaattcattttgtttactgactaatcagacaactttgtatttattctctgctgcttttgaagaggtggtatagtggataagtacttaggctaccttttttggaaatttgcctctgcaagatgctttaaaatctgttgatgagcaggtgatgtctaggtagtgaatagaaaaatcgctttagcttatatccggagtttgcaaaacaggaaactttcaaaatgatttgtagtttgattctgaaaccatcttagctctagctaagatggttgtaaccagacagcatttgtcacccagggagctttagaaaaatctactgtttcctcatggggagtagagggatagattttcaagaatctttttggttcatttgaatgtgggattttccataacctaaagtaatgattaatagtttctctgctcatatcaggttttgttggccagatgtttctttcaagaacttcaatcctttattgtctaaattgaatcagcatcagataaaacatattgcaacctcaaagtccattgcaatccagcaaaataagatgtggttatgaaccaaaattagaggaagaggctaggatggcactgaaaattctaagtgattttcagatatgttaaaaatggctttctcaaaattttgaatctttggaaaagccatatgattaatctacatgctaaatccctttttattttacttctcagaacacaattcccaaagccattaccatactccaaattataacgtttatcttgcttattcaaaaactgtgaaaaatcagatcatattttctgaaaatagcttttctgtacttatattttgcatatcacttctgattatgaaattgaattaaaggaacgagtcgctattgtgttatctgcccacagattattgcaaaatgatagataaatgctgtactactaggatttccatttagcccttatatgttagctgtaaagggagggatagacacatgtatctgtattagtagttgggagtcttcatccagtaatggaaattggatcagtaatgatcattgttttctgccccaaagagaggcttataggattattaatatgaatactacaaaacatctgggtgatgcttgtatctaacagtttatcttggtgatgtatatccagaaactgaatttacagttgcaggcaggaaatctgggtttatatttgagactctgctttatatggggaagggtgagcaaatattaaaactctaaaaactgcattctccactgctctaggtaaagcctaaaattctgtaaattagttgatcattccttcatcttgtagcagcctgatagaggaagagtgtggtgtggtctttggggtccgaagaatttggagaatggtccttaagaaaatcaaattatctttttaagactatttggggttttattctgtaaaatgtctttagtaatagacacgctacattaagatcaatataaatgaggtatggaaggtctttgttctgttgttccacaagtactggaagttactattttcttgctaaaataaacattcttaagaaaaaaggaaatttaatattaatcatttgcactttgggatgaattaagaatttaagagcagatattaaaaacactaaatgtaaagagggctttaaatggctggttgtctgagtcatgtccagaaaaatggatcctgaaagacacacttcataattttgctagttgtgtgtttttatttaaactcttgaaggacagctagttacattctttgttttattgatttctctggaagttttaatatgtagaataaagacatttcctgctgttttccaaccttcaagaatgaatttttaacttaattttgtgagttttgctctttaagggaaagagtggctagatttgtttgatcagagtttcccttggggagggtagagaaacggtgatctgttcagagaggattcgggagaaggtaatatgtttgttacttcaatttattgtagggtcttgatggtccatgcagcctaaacttcctagccgtgacatttgagataactgggggtggggtgggggggggacctgtcttctgatttcttttcttttttttttcaggcagatctatgagaaaggaggtgaattcagcaatttggtcacaagcttaaagggagggttgggaggcagaggagcaagttgagacctcatcacaggttttgcttttagctggatttatcagacaaccatatgtgagagtgaaagaattaagccagagtgaggggtgcctgaaatcagagacctttcgcacctcactgaggctgcaagagggacagctttgaagtcatggtttaatattcccagatactttagttatttcttttttttttttttgagacagtcttgctttgttgcccaggctggagtgcagtggtgtgatctcggctcactgcaagttccgcctcctgggttcacgccattctcctgcctcaacctcccaagcagctgggactataggcacctgccaccacgcccggctaatttttttttttttggtacctttagtaaagacgaggtttcaccgtgttggccaggatggtctcgaactcctgacctcgtgatccactcgcctcggcctcccaaagggctggaattacaggcacgagccactgtgcccggccctagttatttcttaaagttgactaagagtggtttccttcggccccaaaaaactatgcattctaaaacatgaaatgcttctctacacccctactccatttaaattttctgaagtgcccatttttcctgtcttacatggtgaaatcctagctgtttatttttatgttcttcaagatttagatggtgtcaccaggaaccgagtgctctccccattccactaccccatgattttcttacaaaacccagattaagtttctcccagataaacagataaaactaacctagctgatttcttatatcaaagttaacattgtgaatgtcaaagaaccaatgctatgcaatgatgtaaaatatcgctctaatttaattcccactggtaggccacatgtttgcttcagtattttaccttctaagctgggagaacaatgcagagatagcacagctatattttaatatgcatgttacccaccttgaattaacataaggcagcttcctaatgctataaaatggaaatttatgacactttcagatataatgtcgtgcacacgatatgagtttttggggtggttttgtttattcctctcttctcctcccctcatttttaattacatctgcctatataagtgcacagttaattttcatcggctgcccatatagcttgagttttctacttcttgtgttcggaacacttatctatagttaagttttgaggcttaaaagtcagtcatttatttagcacctactgtatgcccaacaggttgtaactaactggtgaacataggtaaaatggaggcattttctcacccacaaactgcttgcaatgaagatgtatttataggggaggggaaacaatggctgaaggtaacataggagattgttttggctgttaagtaaagagatatgacacacacacacgcacacacacacacacacgcataccagattttatctatgcaaatgaacatttaccttagagaattgcacgtatttccttcaaaaatgttgcaattgccctataaatttgggagctactttcttttggtgatgaaatacacaaaccacaaaatttctttttggtctgttatcatatttactttctaacagttttatccaactcaatctttcaccttccttacccgtttagaatgatattaaatgtaaaaaattaaatatactttttaacaaagatgagccatattatttttctatattcaaagggatgtgatgtaggtaatttcagaatgatttaaacatcaatggtattagtgcctagagacaacattcattttgagtacaagttttgctagttttgctaaataaaattgggtacattatttatattaagtatcaaatagtgtatgtgtggaatacaggttcttgataattaggccccaactaagtgcacatagtctgtgggtctaagttagatgaaaaatgtcctaataaggagcaccttgcaatggcccttgctctgtgcttcagccccagccaacttgcccaggacagaggaactcatcccaagactgtggcaggaaggttgataactattatggcagtacctgtttcttacttctgggcctagctatcagttcatatcatccaagatcattacccaaacatgtagacatcatctcaggcctctaacaacacaagtagccagcctcattttagaacacaccagaggactcttgacattctaaattgtcatcttttaatggactcatcccttcttccttctttaggaagttctcatatctgtgtcccggtctctgttgtctgttcctgctgttctctgctgtctgtatctgctgttcttcccagaccacaggcaggttccaacatgtgctttaatttagtctcatctctcataggatgttgcccacctttaacctgtctggtagttgatgtgtgtacatgataccttttgttgggttattctggttttccttctgctgtttagatgagagcttcagtcattctttggtcactcaaacactttcagacataataacacactaggcttgtgaccatttggtatttggggtctttgaataatgtacactgtattttgacagtggtctgggacaccatcaattgataattgttgcagcagaggattgcaagataaaaacaaatctctgtcatgaaagtcagaaatcccaaatgtagaataataatggaagtttgtagcatttttagagcactatatggtttacaaaactttcacattagctattttagttcttataacggccttaagtatcatttctctgattttagtgtggaaactgagatctaaagagatctgaatgatttcctcatggtcacacagccagtgagtgacagaactgaaggtatctgaccacagggcctgtgttgttcccacctcccacagctgaaggagttggagttcctacttttctctgagctagctgcatggctttagagaagtaggatggaaggggttaatatcagtggacatgaatgtctctaatattcttcatttctaattttttaagtctatcaggtttggacacgaaatttttaaagggcatgatttagatttctaggaatccctgtttctgaatattttgggggactagggcttaggttacatcttggaatttttaaggtactggagctatttaacccaaatctcactaccacaaagaagctgtccatccatcaacaccattttcccaggcaaacaagactgggtcagtctctccaaggcctgtcccatgaaaattagagggtgctggcattaccagaaagcaaagcttccatccaggtatggatgagctacttctgagaagggagtaatcagtatggactgaagtaaatgggaattcttcctgaacatgtgccatcaagctatagagcagaagttgggtgaaatttgaaaggcggagtaacaaaggcagaagcatgcaggcatcgctaagagcttggccttaccagctggctgactttgggactgtgctttgctctcttcattagtataatgggggtggtagtagcacctacttcacatgggcaatgtggggattaaatagtaatcatgtaaaaccttagcctgacaagttgatatacagtaaaagcaaactattagttactagctcagtaagaaaccaggatagctaggaacagttagggagtctaggtaggttgggttgggtgggttggattggttccaactgacagggaaagacgctacttgcctcaagagtggatgaaataaatagctatggaataactgtatatgctttcctgcaggctcctcacttaatatatatcgtacaagacagtaatagctaatatcataggcagcaaatttgacatttgttcatttgtctttttgtaatgaattatttgaggtgaattatgctgatgtgtaccaccatcattccatttgaatatgtgtcttaatgtataatgtcctaagggctgcccaggactggtgagcagtaactcactgcaggaggcccctaatttgccatttccacaccactgccccatccctccagcccccttaagttggcagcaggccactctgtcttgtctagtaatggtgatggagagcctgagtgattcttaatcaaagaaaatgacaactccatttacatttgtacagatctgatattcacatttggatgtatgcctaaaggtacctgggttgaaaatatgtggtgtaacattgctttatcttcctaaatcatcctgacacagccttggacttaatagggagtgggacccagaattatgaaataatagcagacatgccactggaggctgaaatttatgttttatgagataaagtggttcttaactatttttgttgccatgttcaatagctagttacttttaatgtttctataataagaaaacagtatgcaaagatacactttaacagaatttcataagctcctacactatgggtaataaccagagttctgaaaataaaaccgttactttcacttgcattttaagtcagattgatagctttctttcatttataacgtcgtcctagtctgaaagcaaaatcaccattttattatttcttattcaaaggctgaaagaaaaaggtaccaagtaaaatgattttgtatgacaaggtcaataagacttggcagcaaagacttggattgaaactttagccttgccattaaccagctgtgatgttgaataagtcatctagtccttgtctcacttgtaaaatggtataatattgatactatagttatattgctattacctggaatgacaccccactcttattattcacaacctggactttttatgacccaggtctgttttgcttttaaaatcttaaatgtacagcatcccaatcttagaccacagcctttgatgcttccagcctgtactccctcacaccctacacacctgttctttgatgttgactaagccctcgggtcttttgtcagtctctcagtccccatgaaactttaataacttgtctctccagccttgggcctcatgatttcttagtttaatcatttttagccaacatgtactatctcctttatcctttgttcttccataatatccaccttgcagaccccttccctaaggtcagtctagctgtttatttttctgcatttgggctgcacagctcaactcagcactgcttaataatcaactgtgtatgtacctgctcagttccttctcctgttttccctggaatagttgctcccaatctccaccactctcctctcctcccttccgctgcccctgccttcattgttctccacaggtgaccttcttctatgccttttagaaaaactggagccattggacaggtatcccttattgggtaaatatcccacaggtctccctctgcctttcttctcaaactcatcttcttcccacattcttaccttctttcatcctaactcaatgtaaagcttttccctctgtgtgagaggactcctcctgctgtttctgttgtctcctcccttgcccagaattgcccctttcctcccagcctgcagtcatcttcagcgagacctcaggactagtttcatctcttttcagaccaagcaacttttttctaccctctttgcctccacatagtcacctcccattttttccttcactctatacaaactgatgtctgtccctgcattgctgtgtaaggtcccaggggcttcataattgccagattgaatgagctctttttagtctttatttcacttggtcttctgtagcactggctctgaccataccctcctttttgaaactcatcacatcctccttcctgaaactttctctttccttgatttgcagtcatattgctgctttcttttttcccacccgctggttgttttttcttggggttcattgcaagtccttctgtctctgtagactgacttgacctcctgaagcccagtcttctccactggactaatggacacatctgtctggatgtctacccggcccccgaaaaccttgttatgtccttgactgaagtcacttcctgccttcttcatgttttcccgagtcttctgtctcaaagaatggcactcttacccacctagattgtacaagccagagatgttatcttcctggaggacttctgtttctctttcaattctccaaaacaccatctacatgtcctgttgattctacttatttattctttggatctattctcttttcactgccagcctttgtttcagatcctgactggattaatcatctccaaatcttggtagaggacagatgaactgcaatcctggatctgagtggtagcgggtaggaaggtgggcaaggagtggggaagatggtgacagggtgacctttctggaatccagtctgatcttgtaactcccaagtgtaaactctttaacatcgtactccttacgtgacacaggaagctgttcttcattgggactttgtcttctccaattgcatatcctgctattttctacacacatgtgatgtcatagccatacacagacttaagcccttcctcatacattggccagtgcctttacttgttgcttgaaatgtccttccttgtcttccccccagtcttattcttctgatcttttaggactgaattaaagtcctacttttgctaccatttctgttcagcccagtctgagttggttgctctgtggaacttttggccatctgcgcatcataatatcaacttctcaagcggccagcctcctgcaaaccttgtatgtcctagactgaagtcaccgcctgccttctgaaaactccattttgagaaataatagctgaaaactcaagatcttgagggaaaaactagtgctagaaagactaagattgtaagtgaactctgaaaatattttcaatctaatgaaagctcttagaaatattttttttgtttgctaaaaggaagcaataaagaaaatgcagaagtcaaatgagatgctgcctatgttaaataatagatactttcaacaagtcatctaacttctttgtgcgtttccttatctgtaaaatgagggtaacagcataatgggctgtgatgagttaatgtgtgtaaaatgcttataacagaacctgacatagtagatattagctattaataataatttttcatttaccagctacaaatcttacagactatctattatttccagccctcctatttttgctgaggtgattagaatctgttttgttttgaagtatgaatagaaaggcatttttttttttttatctggttctctacccaagtgtcagtgggatctaatttattactcatggttgtggagccatcttagtttccactgttgtctcaaaggtgtatctttttctttgacttgagaatggctttgggattctatctaagcaaattaggctcagggaataaggcagaacaatccaacctttctcaccctctcctgcagcacactcgtcttcctccctcactcacacatagctcctttccctctatctgaagctgcaccctccaggccttctttgctttccttcctgtgtgttttcaaggctgccctacacaagcatctacttccgttcttcatctgctcccctcccccaagtctgtctgtctgtctgtctgtttctctctctttctctctctcttatttccaataggatttgatgttgatttacttaaatcaaaatagtcataataccgaaaatgtataacaaaagaaagtcatgattataagttccatgagggcaagaaatagcattttattcagacctgcatttgaggcattcagtagtgagtaaattcttggacaaaggaaagttaccagaagcaaatgagatgatctatagaaaagaaatatgtaaactgtaaaaattagtacacagatttttaaaatcaatctattcttcccctcttccatttgataatggtaacaccttgattataccaaaatcttgaggatctatttttttttttttttattgttaaagtatcttaaaaagatgtcccaaccttcctgggtaactctggccctttaatcaccttcacaaatctactttataataaaatttaaaaatttatggtttaaatgttgtttcttttatttttagtatgataaggtgatcagctgttctggtgacattcatgtatttgtatgttattacatgtttttttatcagcccattcctgaagctatgaatgtcttgacagttttacccaattgtgctgtttatcaaatcatttcagatcatgctcaaagcattctctaaattctctaactttgatttaggtggtggaatttgttttaattacatccttacctaagttgagtgttgaagaatgaaacttcaaagtctttgttttatagagcccaagtccctacacagctggcacctttatacacaatggagatagaagtacaacacgtctgaactactgcatcctttattcagtcttcttttttccaatcatttgctttaatactgtatttcttgagggtttctaagagtattggcatccaggaagaaattgctcatgaatcattattggtatagttaaatgcaaaatagcagttatgaagtttatacaaatctttttcagtagcttcattgctcctttttcataatcttgtagtaatttcaagccttttgttgaaatctagacaagccctatgatatactccttattaaaattattaaatttaaataattttaataataaatatataatatttaaagagaagcagtaagttgtcatcctatcactattgagttgatttttctaataaagtatatcaaatatgggtgtgtcaattaatgaaatacaataatgaagttcatttctatctcacctttgtaacatagaggccgatggattaaatttcgagttcaaaaacatgatagttttcttaatagtatatttacttaaagccatggtagaaatagtatgtgaccagatgaaaagtatgtactggctaatgtattagccagtacaaaataaattggaatgcagcaaatcccttttttgctatcatttattaagctctttgagaaaagtggttttttcccccagaataagtgagtatgtttgagaagtattagaatcctgatttttttgagtaaacgagttctctcttgagaatagtatagcactaagtaagcacaaagttaaaattttatttctggccgggcgcagtggctcacgcctgtaatcccagcactttgggaggccgaggtgggtggatcacgaggtcagaagatcgagaccatcctggctaacatggtgaaaccccgtctctactaaaaaatacaaaaaattagccgggcgtggtggcgggcgcctgtagtcccagctactcgggaggctgaggcaggagagtggtgtgaacccgggaggcggagcttgcagtgagccgagatcgcacgcctgcattcccaccccggcgggcgacagagcgagactctgtcttaaaaaaaaaaaaaaaaaactatttctgtctctaaaaaaaacaaaattgcagtcctcttcaattgttttctgcacttgagctttttctcgaaggaccttacaaagtaaattaaggaagaatactctggatctaacatcgatggttctttctcaatgagttaataacggtggatttcttttctcacgatttttctttaattattatgtttcctaaaaccacatatattgaagattttcttttagtggtgtcttcccccaaataagatgccatgagttgatcttggccataattgatttggagaaagcctctgaaaatggaaccaacagggaaaaataaaaatacatatttttataaaccttcctctaggagtaaaatccattaaaaatgaagctaaatttgttgtgtgagaaatgtaaataatttaataataaaatcgacttaagactcaggtccctcagaaatgaagacagtgctttatatataatagctgctcagtaaggagtctatgaatttaacttttaattaacagggctaccaacaggttcaaccccagaagatgccacttttatagaaaacaatgggaagggtgctttttggagttgtgtaacaatgtggcttgtgagttggataagaaggtgttttttttttttaatttactataaatattatgttcattttatgtgaaattagattttcttcataagacctttctttgtaaaaacttgaccacatatcaaagggcactgaaatccatttcaacttacagaaatgatgccctttcaggaaatttttattggctgcccttttccttaatagtgtaatagtgtatgtatttatgatatgttgtgaatccctgggcaggagttgtcaaggttagacaactccactgaaagtggagttcgaaagaactcaccttatccggacactcctgtttgcatttcagttctggaagggaaaacaggcataacaagtatttctatttctcttcttcatgaaaaccatgagagctaaaaagatttgcctagagccttattgaaaaattgaaaactgatcaaattctaaatagaacttatgtatttttactcctttagctccactgcatttattatttccaaagatttttttatgggttctgaatttgtttcctaaaatgtattcttctcaaaaagatttttttatgtttaaaaatgtaaaaacagaaataacatgtttaagaagtataattcaatcttttaaagcatcatatgtataattgctacatatttttcagtactcaagcccatgaaccgttgaatgctcatcagtggttaataaatattgtgttattattggcattaaattaccatcagtggtttattaaatctaagacagattttctggttaagagttcctgggatatcatgaggtatattttaatgactaaatccagcaattcagttattttgcttatatgagcgccaattttattttcttaatgtccctcatgcagacagaagccaccagtgaaataaaccattaatgttgcaaacacaagactgctgagttaaatgataaaaaaaaaaaaatgcagattgatactgatcttttggatcctaggcaagtacctaagacccaaccaatgtgattgaaatcagatactggcaactaggttgaaattagacttgatattttcagatcaggtgctgttagaagagatcctgcttatgagtctttgaccatatgcctacacctatttcacaattgaaaatgaggaagaggaggaaggaaggcaattttcgtgttttgtgcaggtgtccttagctgactgaggtcttaacagtttaggcaaattttccgtctttccatatttatgtcagggaaagaggatcaaatgttctctttggttcaaaaagcacagcctcattcttttttttttttttaatttaagttctagggtacaaatgcacaacatacaggtttgttacatatatatacatgtgccatgttggtgtgctgcacccattaacttgtcatttacattaggtgtatctcctaatgctatccctcccccttccccccaccccacaacaggccccggtgtgtgatgttccccttcctgtgtccaagtgttctcattgttcaattcccacctgagtgagaacatgtggtgtttggttttttgtccttgcaatagcttgctgagaatgatggtttccagcttcatccatgtccctacaaaggacttgaactcatccttttttatggctgcatagtattccatggtgtatatgtgccacattttcttaatccagtctatcatcgatggacatttgggttggttccaagtctttgctattgtgaatagcacagcctcattcttaactgctacctgtaaggtagatctgttggctgctgctagcagaaatatatcttagagatgcagttacctctgcttctatactttatattgctaatatttaaataaagcatatatatttacagaaataaatcttcctaggtggaaaatatattctgattatcaggcattttaatttacacttctgttctttattctttagagagaatttaaatagaattttaaaagagagagacaatatcttattgtttgcttgacttatatgcaaggccaatatgaaaggaaaatacaacctggaaaaatcttgggttttttgagcctcagttttaaagtctgataacagtacttgttctatcagagttgttatgccttcaagtaagaagtgctatgaatttttaaaaagagaacagaagtgctgtaatcccagcactttgggaggctgaggcagttggatcacctgaggtcgggagtttgagaccagcctgactaacatgaagaaaccctgtctctactaaaagtacaaaattaactgggtgtggtggtgcgcacctgtaatcccagctactcgggaggctgaggcaggagaatctcttgaaactgggaggtggaggttgcggtgagccaagatcgtgccgttgcactccaaactgggcaacaagagcagaactctatctccaaaaaaaaaaagaaaagaaaaaaaaagaaacagaaggacttggaaaagtgtttccacaaagaggttaggaattcattcatacagcacatattgattgagtacccaccatgcgggcactgatctgctactgaagacagaatagtgaacaagacaaagagaagccgctgccctcaagacatttccctcctagagcaggaaatgcccgatactcatgataaataaataaactgtatagtttgttagatgatctgtaaagcagggaaggaggataataagagttaaagtggagttgaagttttagatatagcagccagaaaaagactattggagaagagtcatttgagactctttgacccattcaagtcaagacctgaaggcagcgagcattcaagtgtggcagaaggaagagacatgtaaagtccccatggtacattggaggaaagggagaaggaaactagacctgcaatgtgggcgagtcggggactgggggggaatagtaggagaagagaacagaaatggaacctcaatcacactaaaagcactgtgataacaccatttacccagccactctaccaagtgtatctacacatgtaatttaatccttactgcaacctagtgagctaattgttttgtatctgttctacacagttagaggttctaactctagacccactaattagtccaagggaacctcatacctctttcaaagcctttcctcgtaacctccacgtcctctatagggcctgcagagctctagctacagatagtcaattctctcctagactatgtgaaatacctgctcgagaagagaagatttccaagagtcagcaagatgctgtgcttacccgtctcacgatccctgatgagtcgacctaaactggaggcatgaaaatgtggtggaaagaagaatttcactggagtcagggaaaactcaccctccttgagacgaagctacctgataggtcacagttggatcgcagctaaatttaactataaatcaatgcatttactaactagtcagctaccctcccattcaggcctacccagagcttggggcagatcatatttacttaaaacagcccttgttctttctcagtgtgtcatcatatttcacccccgcccctcccccaagatttcagacaaaagtgttctcagcattattgtcctgatgggagagtacaggtttctgagaggcacttgactacttactcccagcaactagcttcccagggatggatgtgtttgctgacaaattgctgtagtctgtgatggccatcactttgaaggattatgaatatgtaagagccatcctgcatttataaaacaactttcagttttctaatgtcctttttgtaatatgcaggtctttgctcagaaatcacaatcgcaaatgcagtctgtgctgacacagaagacatctgttggagggggagagatattttcagcctttgcggagatctgggtcttctgctattgcaggtggaacaattaataggccataattatttctttcatacactgtggagagtctatatttggatgttattctttgaccatcttgagttctttaatccttaagtatctaaaaggtggtgaatggtgtcagtgatatagaataatgctgctcatttattttttctaaaaaattgaattttgctttccttatttcttggaaacagatcgcttacagcaattgcaagattcctatatccctgcatttgaagaacttatgttggataaaggcaaacacctttattctcttgtcattgactgttacatttttagcttaaaacttcacatgacttatattttaatcaaacaaaataatatatttctgaattgagtacctgataacttaaaactataagtaaacctttaagaaggaaagaacacgtagtatgaagagttattaagatgtaaatattgttttaaaatgaaaataggatattctttctaaaattaacataattagccagaattgtgtccagttataataaaccaaattccatttagtcctaataatacttcattaggttttttaaaaatttagaatatgctgcttaaatgggaaagtcttagaattggccactcaaaagccagttgaaaagtggtctcagaagtcactgggtatagtattgcctgtgttcttaaagaacatacatttttgggatttaagaaaagattttacatgtaagattctactaagcaaggaaagaacaattcgtcgtctgctgtgcctcccttaagccatgggagatccctgaggtcaagaccttatcatttgatctttgtagtattagtgcctattgcagaatctgacatttcatagactccagcattcattgagcacctatgaaatgtcaaattcttttaaaacatggtttctcaaccttgactccattgacattttagacccaattattgcttgttggggaagggtggtgtcctgtgcattatgaagatttagtagcatccctgacctctacccactaattgtcagtagctgcagtcataacaatcaaaagatgtctccagacaacatcagatgtcccctgggaagcaaagttgccccgctgaaaaccactgttttaaagggtttgagagggagaatttacattttttgggattaaaaaaaaactagtttttaaattctctctcctccatatgtatatatttacaatgtagtatatttgtatatatacaatattatcatttttaatttttttttttttagagataggatctcactctgtcccccaggttggagtgcagtggcacaatcataaaattcaatttttttgaattttatgaatttttttgaaagattatgaatatgtaagagccatcctgcatttataaaacaactttcagttttctaatgtcctttttgtcctctcaccctccttcccagagaacaatatgcaggtctttgctcagaaatcacaatcgcaaatgcagtctgtgctgacacagaagacatctgttggagggggagagatattttcagcctttgcggagatctgggtcttctgctattaaccaatatggaccaggttctccttttgtaatgggactgttaaagaatgttgctgtctccagtcagatgacgtcaatggggatggtaggtttacttctaggtagatctagtttaagtttaaaaggagtgcaagtacatacaagagcatactgcagcctcaaactcctgggctcaagtgatcctcccacctcggcagagtagctgggactacaggtgcatgccactaggtctggctaatttttagattttttatagagacggggtctcactatattgctcaggctggtctcgagttcctggctgcaagtgatcctcctgccttggcctctcaaagcactagaattataggcatgagccaccacactcagcctatatatgttttaggtatataagttttagatataattttaccaacatacatgttatgtgtatgtataataaacatacacattcttacagaggagacatttggctgggagtgctcattgtagtctttttttttttttccgtgggaatcattatgactccagtaagttgctcactaaatttcatctgtcactgtgttcccgttcagatacaactaaagcctattgaaattgatttttgtgtcagtaacagagcggggattcagtaagaacctgaaagcttccctttcattactagtctttttcccccatattactttagatttggtgggccctaattatattccagtcttttccctgctgacatttcttttgttttaattaaaactgctggaggtttgaggacaccgtgggagagggtttattcatcaacagcccaaataaagagccaaatgggtcccgatttgtgttactgccaccccaagaatgatagctgggaacactgtggtcctttgcctttgttttttctcatgacaccagtgtggtcctttttctttctgaacaggagactgctcctgctgctgctgcagaagtctattaagtgaatgagacaggactgtgggtggactggcttcctattgaagccatacattaggcaaaatgaaatgcagcattgcctttttattattattatcatctatttcccccaacccccagcctatcgtgtctgtggtccaaagccaaccctgcccactcccaatcacctggttgtaaatctcagacaataggggccagcttcgggctgcatttggcaaccctgtgcagggccaggggagaggatgtaatatatcttctttatctgcagctaggaggtgggatggagtgagcaaagagtctgccagaggtcctgaggggaaagacagagttgcctcataaagtagtccttagagagggagctattgatttgaaatctttaaaaatgaaccctgtttctccaagaacagttgcatcgtcctacctctagttagtaccagctcgggaaaagaggaggcagaggtgaaaggatgttggcagggcagcgtctggaccttgcttttctcttgatgcatctttctctccctgaccctttcctctggtaagctgttgattatgacatgcagaatgctaatgtctctagtgagcctccagggcctatttcagtgacctagttttcttagttaacacttggaaaagaaaacaaaaacagaaccttgttgagcaaaacactcacatcagatcacatagctttcccctccagttaggacaccgtaagccattcttatggtcctcttttttcttaagcttctgacacgcggaagtagacatttccccaaattctatcaagattctcccaggtgtagcccctgatggatcacaggaatctctgttcattgtgatttgtggcaatttacaaggttcactaggcctagaaacttgatgttttccagtgtgatttggcacctaccctttacaagacgctgtcccaggcaatgttagaggattaaacaggtttaaggtggagttcctgcctttgaggggctttctgttctagtatgtagcagccatgtgcctggaggactgcgttttaagggcattagggacttagggcacccagaggagagagaagtgggttccaatacaattcacacaggctattttaagttattaagggctatacaccctcacatttaactttttccaggttgcatcaagaaccttttttgtgtcttcagagggttattgacccttctactaagttcatgtatgtaaaaatactttttcctggattctcagatttcatggaatactaaaatctcactctataaaccccccccccaccaaaacaaaacaaaacaaaaacaacaacaacaacaaaaacatatggttgttaacttttaaaagttaaaaacatttcattaatgggcattttaacaccaaaaataagaatcctgcttaagttgaatacctcttgttttctgaaaaaatcaccactgggtccttatttttcaccttttactggagttgtatgtaaactttaccttggactagtgttcaggtaccagggttttgaatgatgtttatagccccaggtgccattcttggttcaggggatagggaaggctattgtgctgtgtggggaggagtgggatatttggagaggctgaagagttggctgcatgtacatactttgtcgccatcttttgagcccccacacctaggggggttagtcctcccagaaatgaatgtatgaaagccacagatgagattgggcgtggtgactcatgcctgtaatcccagcactttgggaagccaaggtgggcagatcacttgaggtcaagagttcaagaccagcctggccaacatggcgaaaccctggctctactaaaactacaaaaattagctgggcatggtagtgggaaccagtaatcccagctacttgggaggctgaggcaggagaatcacttgaacccaggaggtggagattgcagtgggccgagacagcgccactgtactccagcctgggcaacagagtgagactccgtctcaaaataaataaataaataaatgaataaataaacaaataaaaaatttttaaaaagccacagatgattgtggtaattctgtggtataaattagatgagagccagtgagagctttggttttgtgctcattttttgggttgagaggaggttactgggaagtgtgttcttggcgcaaggccctggcccagaggctggctcgtctgcttttgagttctcgtcacccctcatcttgtctgcctcgtcactgctgtcacttcagctgtgcgtgtctttcctgggtacaggcattaggctccctgccacggaatctgcatacattaactattgtctgctaaaaattgtgactatttgatttttttccctttaagcatccattttgatttataaactgagccaagctggcagccaggaagactgaagaatcctagtttctaacaaagaaaaatgaaacccagtctcttcttccccacttcatgtctgtgagcaagtctcagctttcagttggcccacccctgaacagtcttgaaagcaatccattttctgtcactcagaggtgccaagcaaaggaattcacagtgagtggtgttgagatggagagtaattgcttgggcaccatcctgagtcggtaccttgctttacctctgccacaagtctgggagccataaagtctgaattacagttctgcacatatggagagcagggtttttaagccaccaacgaatggcacatgtaggccaaggaaacacaaaggctccatttaacctggggaagacttaggaatggacatcatgccaagtatgctctgtgaacattcatgttacttgatcataaggatctttggagtcttttcataaagttgtcttgtctacctctttgcctcaagacatgttgtatcaaggaaaggtagcattcctaaagatgtccagatagatattaactaacctttagtctcaaatgggagtggaaaaccagagttcatgtttgccatcatcatgacagctcagaagtaaagctaaaaccaatttctggtttctctgtgatctatggaaagggaaagtaaactggtctctctgtagagtttaaaagaacttcatccacttaaaatcatcttccaggtttttatttatgagcaaaataattataattcctgcttacaaccccaccctatctggtcccatacactctgtggctggggaaatgtgggggtaagggaaacagatgtagatatgtggatggtaccaagaacccaaacgcaaccctcaaatttcatgccttcattcagtctgtttttcagcaaatatttgctgagtgcctgctgtgccaagcactatgaaggcacaagggaaatacatatccaatctattcccaagtcctcttcatttggcctcctgtccattcccacattctccaccctttccatcctaatccaagtggccatcatccttcacctttctccaggaaggagcatgaccttgggtgaggtggctctttggctaagggccattcccagagagggacctgacagagttgtcaggtacttcagtctgtactcgagaatcttggtggcacactgcagcatctatgattgatacacagatgatagatagatagatagacagacagacagacagatagaataagaacaggtgagccataaaacaacagctgccattactacatattctacattctgctttttttttccattttgatttgatttattttcatggttctggtgatgcgtgttttgaaaaaaaaatcacagtgctggttatgatcagtggggttgggatagtattctgtggaaacacaaaggtggagtactcatttgcaattaggaaattgaagacgacttcctcaataaagtggagattaaatctaaggtagataggaaggagaatgagccactctctacctgtgtgtgagcttcctttggcaggaggatgaagacagtggggggaatgtctgaattttcaacaaagatggtttgcttgagtgctttgccagaaataaatgtatgtgggtgacctagaaatgaaagtattctgtcttccaggctagccttaggctagcagctcaaaaaccctcttgctcttccttagaaaataacaacaataacaaaagtgaagcttatgtggctgttaaaacaaaactgttgttttctcttgcattcattttagggaggagttgaaggagtagggtattgtattaatcgtacttgagtgatttggatttcacctcgatgttgaattattttacatagaacaaggatcagcatagtttgttgcctcaaaagtgagggagaagaagggaagaggggagcagagtaggttcttaagtgtgtctgaggaccaggctgagccgtgaccccaaggctctgcctcccttgttttgatgcctttcttgttcctttctggtggataggctttttatgctttaggacattatctgacattaggcttggggtcctatcagaatatcagttttacttttctagatttagcatgttcactagcttttgccattattggttatttctgtaggaaaaaaataattcagttcatccttttattaaaaaatgactcagcaactgcaatctgataggacattttctctaattttcatggagaatttttttaaactcttttatctccttttagaagttttttcttttcagaatttaatttttagttcttggttgcacatgtggtttttttttttcattcatacatttgtccattttagagatgggatcttgctgtgtttctcaggccagcctcgaactcctggagtcaagccatccttctgcctcagcctcccaagtagctgggtgtacagacgtgcaacactgcaccagcttgaaacatgtattttagatctaaatttagatggtgtctatatttgtattttaaatttctcttataaggaaaaataaattagaattggggtactgttacattttcccttcaaaattctattgcaataacatccccttcgttgcactgcccccaaatttaaaaaataaattattaaaaatcctatgtgaagcaaagatgactggttcgatatttagttccagttaagtaaaatattaaaagtttgttttaaaaattattttaaaagtttggcgatagaaatttgtgatttaggagctggatggtagaagtgggatggaggagaaagtgtcctaagtttagctgtgaagttttggcctgatctctaaaaggagaggattgggttaggctcttaggggccccttcctactcaattcatttctgattttataaagttacctctttaaaaactgtcttacaatgactgtgcctcaggttcctagtgagctttaggtcggctgactccctgccattccctccaagtctgccttaatctggatcataacttggcctgatgttctctggggatagaaaaggcagctcatgctgggcaagttccttcatggccctttcctgatcagcaaaatgtgacagctcagcatccttcctgctctagcgcgtggggatacctttgcctgggagtgatctgaggctgctaattgttccacctccaggatctcatgtaagcccaaactgccatcccaaggtgtatttttcagttagctgtcagacccactgagaactgctgtttcagccgggaaatgaaatttaaaatttaaagtgttgttttcttttccagtgttaccttccatcattttcatagtggctacttaaaaaaacaaaaaaaaaaacaaaacaacaacaacaacaaaacaaaaaacagtagcaacaacaaaagccaagtatactaggttttttaaaagagctgatatcttatttattccaacaagaactgcccactgcctgtgttcgaaatgtaacacacgtcacttttatcccgcctcatctctggccttgagccagtaccatgggctggctcagccctaggctgctgatgggaagaactaggtgttgaggtgtccttgtaacaaattattcactcaaagaggatttcctgcttcttaaggacttaaaaatctactgcaaagtctctcaaagtgcatgctggcagacatgcctcagggactccctcaggaatgaggggagtcgggaggcagagcagactagagttgggcagtcaagtccctgcttgaaccaagggagttcacttaaggttttatttggggaaaaggttgggctgcaaatggagccacaggggaaggaagggagagaggaaggaagaccagagagggagagagggatattaatcctttgaggtccttggaataatacacacagggacatgttcattgatagacagaggtgacgaggaatcgacaagtgaggtatcagaggacagagtactgtaattgaatctggaaagagagagtaagttgtctgaggagtcaagaaggcaaagggcatcccagaccaagaaaacataccatctgagaggcaagaaacaataaagtacatttacagaagcgcaaacagtttgttctcaaggtccacagagtaagagcaagtgggagcctaccaaggtggtatggcagaaagggggtcagctcttggagggccctgcaagccgtgcccagtggtttgtctgtatcctgttacaggtaccattaaaataatttcaaggcaaatcagctatataatatcagacagaccctctgtatttgcctacgtttcccctaccctctttcagtgttttagcagatgaacagccattatttaagacatgatttatagccattactttaaagtccactgttggttacaaagctgttgattcctttgcaagggtcatcattacggcatcacagactcaaaagaggacgctgttgctacttcttccttgtgcaagattgactcatggtttgcaggaaaggtagcgttgctgctctgcaagaaagttagtgttcctggttctgtagcagtggcacttctctccctatcaatcttgtggaaactaaatttctaaatgctgcttgggatggaaagagttggtagtgctgatacccactcactgccctctctactaaccactgagcccagtctccccacgttttgtagatggggaaatgagggcccagacacagccggtggtcatgggcagagcctggacaagaactgggcctctgggattctggtccagggctctttacaaggtaacacgccatcctctccctcgatttcaggaaagtggaaataagtgtgaggggctgtgtctgtgaccatattggattactgacctactgtccccttctttgtgctctttccccagtgaggaggaaaaaaagggcagcagaatgggggtcaaaagcggaaggaagcaccatcagaatcagagtaaatagatttttaaagctgagatatgtgagaagaaagaggacaggcagagtgggcagaagttaaagggccagaggagtggggaaaattaggttagtaagggagaaaagtagtagaaaaagggaaaggatttaagaacacaaagatataggtggtctcaattacaaaattgacccactaatgttttctaccacaacttttaaaaaatttgatccaactaaactagcacattttcaccaacttcaactactgaatctgaatcacactaggccaatcactttttccacaccacaattatacatgcctccttatctgttgttaattcataaacatgccacagcatctatgggggaggcccttactattccaggtactggaaatacatcgatgagacatggtccttgcctttatgaaacatacagttcagtagggaagacaacatttaaaattcaccagaagacaggaccatacataattacggccagcatctgctgacagctaatctgcatatgtcactgtcaagtactttgtatacatgatctcatatcgttctcactacaattctatgcattaggtattattattatttcagtttttgagatgaggaaactgaggcttggaaggttgaggggcttgcctaaggtcatgcagctaggttttgaacccagctgatcttagaagctatattttattgcctgatagcagcaataagtaaaatgtattttggaagctatatataaaattcatgtaaaagtagtgagtatgaccatctttgctgttgtctgagagtcacatgtagacattgtgttttctcaaggagcaaacaaagagaaaataattctcttctgagagtgcccccttggcgctccctactcgtttctgattttgccacgtggttgctgcttcactgtggttctaaagaccaaaagagcccaccttggggaagcagttcctaatgttcaacactgtctccttgatcacaaatttggattgattgctatctgttttagtttaggctcccttttaagataaagataaatgaacaatctcaggtgaattatagcagaatcatatccagttaaaaccatcacaggatattttaagaatgaaagaaaccaaagtttcttcatctaccgagtgttttctaacagagagatacttgtgtattcttccacgcaggcctagctccccttcgacataaatcctcctctcatataagctcttgtcaaatgccttggagaggagttagaaccaaattgttcaacattgcattttttatttgacttgacacccactgtgaaaataaacaaagtgactggggacgttttacaaaataaacactaagtagacatggtgtttctgtgtgtgtctgtctttctctctccccccattgacatagtacagcactgatccaagcaatttttctttattgttggaattgaatgctactattcatcatcagaactaaatcttttgttattattttttcttcacagggtcgtcatgtcaaaacgggccagcttgcagccatcaaggttatggatgtcacaggggtaagtgtctttattttgccatctcaatagccatgcagatgctccttgacttatgatgagttcacatcctgataggcccatcataagtagaaaatattgttaagttgaaaatgcatttaatacacataacctgttgaacatcatagcttagcctagcctaccttaaacatgctcagaacacttacgttagcctacagttgggcaaagtcatttatcacaaagcctattttataataaaatgttgactatctcatgtaatttgttgattactatagcaaaagtgaaaaacagaatggttgtacaggtacttgcagtatgatttctaccaaatgcatgttgatttcacaccactgttagtcaaaaaaaatcgtaagttgaaccattgtaaatgagggaccatctctatatttgtaatagagaagttaatgatagaaaaaaattgttttctagaaaaataatctccctaaatatctaatatctttccccacttgtggctaacataaggaagagtatgcagtagctgactgaagagatcatgggtacatcactctaattaaatttgatacctacacactgccttatgtagttagagtgaatactgtttgccaataatttacataaacacaaccacagatatttgcatatgaatgcagaacaaggatgtgaaggtattaaatgaataatactgagattatacagaagaaatgagtcttaactgttttcccaaaggtctgcctaccactggagtagacaggagcttggatggctctaagatcctagtaggatatttaacatgaatatttcccaaaacaaaatattactgaccaaataatcacaataaacacaaattcttatcattatagagcaacaatgaaacaaaatttctgcctggataatcaaaagcaatctaagaaatagattttattttaaatacaatctaatgttttcgatccttttgctaagcctacttaaaatattttaatgccttttcaagagtacacagcaaaaatctgactcgaaaggattcactggacatcaaaggcatgttaataattttctgttgtcctggggatttttctaagatgtctgtctgctgtacatgaaagctaaaagaccaaagtcttccattcagcccagaagttgattattcaatataaatagacatagaatgaatgagtcacacaaaagaaaataagaaaaacaaataagaaaaaaataaataaataagaaagacacacagtatgtctgtatgtcaaacttcaacccataccttttgggctcactttgttaccttagataagtatatgttatgtgatagttacctaccataatacacgtttcactaattattgtttacaccacacattgtactgacttattattgatctaaattcctctttaagttgtatatatttttgaccagtaaaatattttgttcctgtatttttgttaccatttagataaagtactaattctttttatttgtcttaaatatattatttaagttttaggtattacaaaagttcaaatttttagtcccaattagtttattaattcacctggcctttactgaataataaactgtatgtgccttatattaattcagtttaagaaaacgctaaataacagaggattaagcataatagaagtgtcttgctctcatgttaaaggagtgtaaaggtggacagcctagggatgtatgtcagtgatatggtagagtgaaggatgtttttatctttctgctccatcattctaatgcatggcctccacagttaaggttgctttatggttcaaaatatttattggatttccactgatcacactttatggcaggcaaaaaagggagagcagggggagcagaagggtacaaatgagccccttccagtgaaatattttctacttccatacaacattactacttacttctgctttcattgcctgtatctagctgcaagggaagctagaaaatgtagtcttttattctactaatgtgtctacttaaaaatccagattctatcagtcagaaatgaagggagagtggatactggaatggtcgattagcaggatctgacacaaaaattaaaatcagatactatcagtctctacatagaaacccattataaacgtgtaaacattttacaaagctccaaccacagaacaaatcagaatttgttttgcaattcagctgaagtcatactactgtattttccttggattgaataggatctctgcataatgagatgagcttggcagtttaacaattaatggttgtggaaggagtccaagacattcatgctgtatattaaattctattgtgtggttttgaagaactacagttgagagttccactgatgtcattaatcttggggcataaaatgtgtgttgatgttcaaagtatgactctgaacaatttaaagcctcacaagtagaaccagaaactactcaagaaccactattgctagaccaccttgcttggaattaaaagttacacagttatttttcccagaacatgtattttcagcttaaggaatgtcagttagtctttctaaactgggtttcattaagcatctaagctctacagaagatgatttgagagactgccttctcagttcttccaaggagggtacagaggtaaggccattttacatgcaaaggagtgtcaatccattacatagagtggatgctttatagtatttaggcttaattctcttggggaactcctattgaggagggctagatagtttttctgtgattcagtcatgtcattgatgattatttaaccactgacttttaacgaaggcaaacatggatgcacatcaggaaatggttttcttatttttgtggtgtctgatgtggcatcaagagacttttgtatcacccccttacacatcacagtcaacataagatttcctttgtgaaactcacgtggtgcctttagaagacagtctattctattttgccatgttgtctattgtgtattacagaatgctgtaaaagcttcttaccaattattataattgtactcattatggttgctctgttaaaaaactgaaatgaattctcaaaggtcgtctttgttaattacatgctatgacctactacaaagttactatagtttattgttataaaactgataaagccataagcttgacatcaatttttaaattattgtttttattctatatcacttcctttttggtataaaacagccattgagagaactggatataatgcttatatccttccatttttagagctgaaacacttccaaatttgccaacatttgcttcagaatttgtgcttaaactcagagtaggccttgaagatcttatagtttgaaatcattatggaaatttccccattttgtcacagtctgggatttacctctcagctggatttttgcgctctagattgacctacggcatctaggaggagctggaccctcccaggtagtgtttcttaaagtggaccatcagcatcagtgggcagtcagcacctctgaagtactcatgagaaatgcaaattcctgggcctgctgcaggatttctggggtagcctcaaaatctgccttttctgtaaactcctcagagtgtcacacacatcaaaatgagagtaccacttttctagggtcttgtatttacttctttctggccaccaagtgtgaaggagctatggttttttgtggggttttttttttgataaccctgtaaataatccccattttcatttggataaaaattcctagtgtaaagtagtccctttacagtgacaccctgaagtgcatataggacttaatgaaatactaatattgtaagcttttgcctttacaatgactggttgtgattacactactcaggacatttggggttgtagtaccaaaccgccactcaaactgaatgaagctgaaaagggaatttactagcttgtatgaattaaaacaacaaaaacctcagcaggatgcagagaagtcacctaacatgatcaggattttgtctctctccatctgtgggctctgctttcgtcccagcagcagctgcaggctcatgttttcactacctcattgccattggtcccagcaaaggtgccagtctgaatatcagtggtccagcttggaccatgtccccatccctgggccaattccttactctccagtccacgcctgggctggatgcctggctctggaacctaccgcagggactgagagttggagagagttgatttctcaaagaaaaacctgagagttattatagaaaagagtgggaaagatgctgggtgggcaaaaacaggagaattctatgactataatatcatatattatagtgagtgtgttcaaaactgatttggtccttaagtaaagtgtttctctaattacattttttatattcctatcaaaaagaataataatggtagctaacactaagtgagtgattactacgtgccagaactctttaaaatactttctatatattaattcatttgatcctttcagcagctaaccaagcaggttccatgattagccccattttaggatgtgaaagccaggcattttaagtatcttgctcaatgtaacatggctgccaaaggaaggagtgaatatttcagcctgagcaatgtaaccccatcctttaagtctatcctcttaaccacattgttttcagtcttcaattcatgtagtgtttaatttcatgtgattcttttttcattgatttattcaacaaacatttactaaaatctactttatgataggcactggaaatttaaagatgaaaaaaatggtcttttgcctgctcacagtaacacaaccttgccctaaatatttataaataaagcttatacactttataacaaggctgtagaatgtgtaaataacgttacttgtaaagtttgtcggaactgtgaggagacagtcctcactgaggaagcccaggaggacagtcaggtgaggacattccagccaagaatacagccggtgccaaggcatgaggctgagagggcatgttctggaaactgcacatagcttagtttcgaggttaaaagtgccaagaaggcgttgatacaagatgaatctagacacattaggaggggccaggtcatgaaggaatttaatactgtgacaaggagtttacaaggtttttaatttttagttttctcagtagaacactttgatcaaatagacttagagaaaaacccaatacataaaagaaatgtaagcaggttttcttttcttttcttttctttttttaaaccaagggtgggagaccgtaagtcctggctcctttcctcaaactactactagagccaatgcaagagccagaagttgaacaggagagtaacaccgtaggattgcctactaggaggatccatgctaagctctgcttcactgaattcctatttctgtcttactgaatttctgtaggtgaagcttatgaccagcctccatctctttctgaagagtaaggaagtggtcttctcccagtagtagactgttttgcccattattaaagggctcagtgaatgcttgctgaaattgcacaaaaagaaaagaaaaatcttttcatcttgggttgtttggaagagtaaggtggacacattgttccaagtacatttggttctttcatcccaaagggaggcagttcagtggcataattaatagtatgcacataatattgttaataataataatgacgataggcacaggccaaaaaggggctaatactgattgtttatcatgtcccaagcattgtacttagtacttaaatgagtacttagtactcatttaatccttaaaacaacgtccattaggagaatactgctggtatatctattttacaaaggaattgacagcagagagcccaagaaacttgcccaagcctcatggatagtaaatggcagggttggaattcaaatcgagccagtcagggcatacccacactctccacagacatcttattataggatgagaaatgagagagtattgccagagcatggccttcagattcagagagagctgggcttatattccactcatctccttactgattgtgaccttgggcaaattttaacttttctgagccacagttttcttattggttaatgttgcaagcttgttttgggacttaaatgggatatatcttgtacctgacacataataggtcctcaatacatgattttaatggttagtgccagtaaggtacattgaatcactgaataagacagacaataggaatgaaaagattttagtgtgcattaaaatcctgtagttgtatattttgatgacagcctgatctgtgaactacgtgccaatttgtgttagttaattgctgatatgggtaaatagtttgcactcaccctatctttaccacctcaattacagagttgttagccttaccctgaatagtatgtagctgaaaaaaaatggcttactagagcaggatccaggaaagaaagtgaagctagattccagaggctgaaggctgaaatcacaagatttcattcattcatttacttgagaatgaatgagtgcactgtgctacggagtcatccagtgaacaagacagacatgggcactatcttctggaatcttatattttagtacaagacatttagcagttaaacaatagcagtcacaattctgattaacttccaagcagtgtacagagtatgaagagagaatttaagaagaaactgacctagctgggtggccaataaatgatttctgagaaagtgacagctatgtgagatctacaggacgagtagaccttcgttagccaagtgaaggggtaggggaggtgcacctccagatttgggagcttgaccttcaggtgatgtcagcaaagcttggggattcccatctgaagctcctttgccacagaggccctctggacagctctttgggacttttactttggagccatttatgtagatgtctttagcagacagaacagtctgatcaagcacatggtcaaaactttcaacagagaaaagataaacaaatggctttttttgtcttcctaataccctccacctttggggctattttcagtgcttcaattctgtatgctatacagcatgtagaacttggaaagcttctagggttctaaaaatgaacaactgagctgcccactccatgcacactttagcatctgtcctcttcttgcatacagattagacccttttggtggcttatgtgtgtctgggtctctgcgcatgttcatgcatgctgtgtgtatggcctggatgttgggcttgttgtatgtgtatgctcacatgttagatacattgcttaagtgcaaaaaataggcctgggggctactgtctatacctccaaactaataaaggtgagcaatagtttttaaaaatattttttacatcataatagtttatattcactggtccttttatttgtgtacctcaaagcacttgatcaaaattataattaattcccttagccccctagtggggtggagatgcctgtagatgacaaaattggcatacagaaactggggtgcttggaatcactgacggggctgttcaaagcatgatttccaatcaagttcctcagtagtggaacacaaggtctccttctgcaggtccgtcctttcctttatgctgccaacacttcccacctcatattcattcccctcttttgacttcactaggtcttctcttgttgagctctgttgctcttctttgatttgacttcctcatcagtattttgaatttctatttaatgacttgggaagttcagcttttatttttattcatttatttttcattatactttaagttctggggtacatgtgcagaacatgcaggtttgctacataggtatacacgtgccatggtggtttgctgcacccatcaacctgtcatctacattaggtgtttctcctaatgctctccctccccttgcccgccaccccacgacaggccccattgtgtgatattctcctccctgtgtccttgcgttctcattgttcaactcccgcttatgagtgagatcatgcagtgtttggttttctgttcttgtgttagtttgctgagaatgatggtttccagcttcacccatgtccctgcaaaggacatgaactcatcctttcttatggctgtgtagcattccatggtgtatatgtgccacattttctttatccagtctatcattgatgggcatttgggttggctccaagtctttgctattatgaacagtgccacaataaacatacatgtgcatgtgtctttacagtagaatgatttataatcctttgggtatatacccagtaatgggattgctgggtcaaatggtatttctagttctagatccttgaggaattgccacactgtcttccacaacggtcaaactaatttacactcccaccaacagtgtaaaagctttcttgtttctccacatcctctccagcatctattgtttcctgactttttaatgatcgtcatgctaactggcatgagatggtatctcattgtggttttgatttgcatttctctaatgaccagtgatgatgagcatttattcatatgtctgttggttgcataaatgtcttcttttgagaagtgtctgttcatatccttcacccacttttatttttccttcattaaaagttctttctcatttgaagcctactgactttaataagctttcaaggccagggacaggaactgtgcattatccatctttgcaccccatgcagagcttgctaaggttgaacctggcactggcactggcacctagtaggtgctgcattatgtgttatatatgtgtattatatgtatatcattatatatatatacacatcattatatataaaatgatatatatcattatatatatacacatcattatatatataaaatgatatatatcattatatataatatatattataattattactaaattatatattacatataattataataatatatataatttagtaatgggtttgctgggttgagtaaatgattattgaatgattatatgaatatgtattatatattttataatatatatttataattatatatttatataaaatatatatttataattatatatttatataaaatatatatttatatatttaatatattatattaaatataatttaatataattaatacactaatatagtaatattttatatattaatatgtaataatttaatataaatataaatataaatatttaatatttattatatattaaatatatataaaacatataaaaatatatatttaatataaatatgtaaatatataatatataaaaataaaatatatttatattaaatatatgtaatatatatcaaatatatatttataatatataaaaatatgtatttaatatataatatgtaaatgatatgcatataatacatgtatataatatataatgcatatatagtgtatacaatgtaaaaatctatgtagagtataaatgcatatttatgtaaaaataaatataaaaacaatattaagattagaaagccagttgaaggaaaagcaaattgaaattacagggccacagagaacttgctagttatttttcccaataaccaaagccaaaaggggggaacattataaagtacactgtttatactatcagaaaaaaaaaaaaaaactcattccaattcctgtgggctgttacctgaattgtaaatctaggatccttgaagatataagccacgccatttatggtagactttagccacatgagtgacattattgctaggtttaaaacttgtttacttctgggttacttgagtttgggtcttgttaattcgtggttttcttgggagtcatgcctcagtgcaggcttgggtatgagaaagacatatgtcaaccttttgttatctacccctttagggaactccacttcattgtaagagaaagcaggttagcctactggcaaagaagagccctgcacagtgtcagtctcgtggaatatcctagttctgacacttcatggctctctgaccctggacatattgcttaatgttctttattctacatctataaatgtggataatgccacttctctcacaaagttagtgtgagatgtaaatatattaatcattatttataaagggtttcagaacaatatgtagaacacggtattctgtgcctattgttgttattattaccaggtcttttgcagacaatttttatttttctctttatggcaccaaaagcctccaaagtagaccacatgctacatcctctccagccacacgaccttggcaaacactttctctgccaggaaaatgtttctatcccaatcacactacatcacattttctctttttttcttcccaattgggtaactttcacctagccttaaaaactcagcttaaacttaggtttcttgaggttaattagatcagctaccacatacttctcatggtcgtaattttgcatatatctcattctttgattcatatctgtgtcttccactaaactgtagtaagcttcattgtagcagaacttgaatctgttatgcctattgtagtatgattatattattgacatttacaattatgactggaatatagtaggcacttagtaaataattcttttttcttctttactttttttttgcaactgttattttagactcaggaggtacatgtgcaggtttgatgcttgggtatgttgtgtgatgttgaggtttgtgacaaatgattctgtcacccaggtactgaccatagtacctaacagtcagttttaactcttgtccacttctctccccagtctagtagtcccagtgtctattgttctcatctttatgtccatctgtacccaatgcttagcacccattcataagtgagaacatgcaggattttgtttcctgtttttgcattaatttctttaggataatagcctctagctcaaccatgttactgaaaaggacatgattccattcatttttatggctgcatagtattgcatggtgtatgcataccatattttctttacccagtccaccattgatgggtaccaaggttgattccatgtctttgctattgtgaatagtgctgcggtgaacatgtgagtgcaagtatttttttggcagaatgatttgtttgcttttggatatatacctagtaatgggtttgctgggttgagtaaatcattcttgaatgaattaatttaacttagagttaacatatacagcaaatccaggtgctgcctgcagaatgtcctggcaaagtcctatcaatgctaaaatgaagaggtagggacttagacaactcgttggatgactctgggtctgtttccttaaaactatttgatgtaatagatttattacatctaattatttattacaatctattgtaattatttattacaatctaatttattacagtctgttagatgtaatcgatttaaggaaacagacccaaagctgcataacttgaccctgagataattttaggtgatttacatgtttaattctcatttaattttaaatatattttaacatataataaactgtgatttaaaaagcagacctcaaactgtatgttatacaccaactttgaacacactggaaaacgccagcctgttaatttgtgctgctaggttaccctattcatgtgcagaatggcattgattgtgaagatcctactaaaatttcaaggcatgctcttaactatttcaactatttatcttaggaaatgcagatttttctccatcctatagaactgaaagaaaaatgaaaattaataagatattagagttgatgtataactttaaatttctttctaattttgtattcactagaacaacttcttgtcattgactaattgtataagtagatattgctttaaacaaataaatgtttactgattttaaaaatttagtttttgtcagctatatatttgcatcctgaaaaaaacttctattgcagggagggatttcactattacaaattatttcagaagctttttaaaaaccacattctatatcatagtgacgatcccttcaaattctcgtagcctgtgatcctttaatgataaagtgtctcctactttttgccacattcagtcaatgctgaaggtgagaatgacagataacacaaacacctgcttaatggcaacagctgctgtgaaagcagtgcagatgagcgggagcagagatggttctagccagtgtccacacatctatgggatagtggcatttatgaatctatacaccttatacttctctctagacttcttcctgactagtctcttagacttgctgtaggaattgcatagtttcattcctctgccacggattgagagttaaatgttgggcagactttattacagagcatataactaatattaaatgttttattccatttttaaatgctagcatatcataggcacttaaagtgtgttcccctgtgtaataaatatgcaacttaaaatcccttctttattccttgaaatcaatcataagcaaatattattgtatgctaacaagctcctttaattggaagaccaaagtcagggttctcttctgccctggcttaagatgctcttaaacgcttccgattaacgactttggttttggacaccatggataattgcccttcatctgactagtagttttctgtaaagaattaagaatactggctttggagtcagagaaatctggtcttgaatctgaggtttaacatttaaagtatgagtgaacttgggaaagttacttaacttctctgagactcattttactcgtttgtaaaataggatccagcttcatagctgttctgagtgctcaataagatagttcatacatacctcctggtacacagtaaacattacatgaggttttggctttggctatgttttatgaccacatgatgacaatcatgttgccatcagaggtggtcagtggcttaaaagcattaactggaattatctatttccttgcatttgaaaactgcctatcttcccatgatttctcatcttctagaaggtcaatcccggtttctcacatgggggttgaagggttggttctctggcaagcagtaggagagggccagtctcaaggcataagtgcttttcgggcctctgcttcttcatccgatttgctaatgtccccttgaccaaagcaagacatgtggctaagcccaggttcaaggagaagagaaatggactccacctcttgatgcaggtgggacacatatcatggccattttctttttcagtctaccacaaacactaagcaataagtagatcctgtgatcttgagaaataatattatcttctttatattaatactaaagctacatttaaataagcacttaatcatttctaagccctgagaagtagcttatataggtattcttattcctatttatagctgaaaatgactgacatttggagagtttaaatgccatggctgaggttaacataatgaatatgactggatttggaagtcatctgatttaagtaatccttcttcctagagtaccggacttggcttattgaagttactcttttaaatgtgtgataatttggtaccactactttatttttcattattgcccagtggtcattagtttatcagagggcttgatccttgtgcttaatacttaagatttggaaatagtacatttacaaaataatttacaaatagaggctattcaaattctcgtagcctgtgatcctttatgataaattgtctcctactttttgccacattcagtggcaattctgccactgtgggtggcaattctgataggtgctacaaaggaaaagatacatgatgattcatggggctataactttttcacttataactttttagtttaattctagcctcccttgctctctttgcatttttggaaagcattgtaactcatctcccttgatgggccatattgtgagaggctgaactctttgtgacatggttaaatgagttcttgtctcatctagtaacggtcttccttcctatttcactgaataacttactgccatctgtgccctagactaaaaatctggataaacagtaggcccaaaggcctgctaaattgcatgctgacttaaaaagttgcgtaagatcaaggatttatattttagaactacctaaccatgtcttacagtggttccataactgtgtttggaaacagtgcaatttaaacctaaaattcaagtgatttacattttggccttcctgcccttttatttatttattttttggttatgtagattagtaataacatttactttgtagtacactttataacatacatccgttatctaagtaccacaaaatgctgggacttataatatctttatctcattataaatgagaaaacttagggtccaaaaagataggcaactttcttgggattctgcagccagaaaggaatggtacccaaactcaacatgcaccccatctgcccaccctcttctttctgatcccagactcaatgcatatgctgtccttattgtcatattgcctcagtttacctttgcaaaatgatggagaatgtactgactttattctgacctccagtactatttattttggatttaattacatagtgccttctgttgttatttaactgttttataagctcttattttcttaatgacatggtgagctttttataggcagtccccccctcccctgtctttcccacatcacccactatcctgctaagaatccaggaggcaagcggtaaatacttgtagaagcagcctgatttctcactaagaatgactgatgctaagattgacaggctgcagttggaaagtgatccgtgtcttttattacctcacgtagttgcctttttaatggaagcagctgtcgatgctgtgctgcccacagaaaccctcaggtcgtttttctccctttctatttaggcttccccaaagtacatccgctcacatcctacattcgtccacaattatttggccccatacagcaagtttaaaaatagccaatgtgcaccatagtaagacattggaggtgcgctgtagggacccttcaacaagttgagggctggcgaaggtcattctcttcacgacctgcagtgaaggcgtggggagtttctgatggctgctaagaagaataggtggtcagcagtgtgccttcccctgtctcgccccttgactcccttccccactgtttcggccacatgcttctccttagctcagcatcccaagcatatattctattttgagattacctagtcttcagcttagttaagccatgtgatatgtaacatgcttttacttctcctaggtttgcaaatcccctttgttttttcctaaagcttattttagtaaataagcatggtcagcaaatgtcagcacttcactattctcctcactctattcttacctgttccttctaacatcactaatgctgctctgggcattgggctctttgtagttatttgttcttttagttgcatttattcacaggcactgcttggtgctagggatgttgtagagaacaaaacagggaggattcctgagtttacggttcttaccgactgataaggagaggagaccttaatcaaatgataaatgtgggtggcaattctgataggtgctacaaaggaaaagatacatgatgattcacggggctagaaccaaactgggcagatcagggagctttgctggggaaggaactgtagaactgagatctgaagatctggagaggagagcttacaatatagggagaagagagtcgagtaatgggacatacctccataccaatgtcaacaaatacagcaggtatgtgaaggagtgtaggggctatgaccagatgcagtggggggacttgacattgcctgagagaattaaggaagagatccctggtgaatgtcgattaaactcaatcaggaatggtgagtagagcttatgtgaagaagaggtgggggaaagaagacagcacacgagagactgcaggaagtcccagtaatgcagagacactggaaggaggcagtgcagccggagtggaggagggtacagacaggggacaccatgggtagtttttcaggtcatgataatgtcacatcttgcactcagggacagtcatagcttactgctgcacctaaaaaattatcctgaggtagaaactttctcccccaacctcaacaataaaacactcttctgcagtccaaccaatgtgtatacacatcaagaaaataaaattatgggaggtcaccatctccaccagcactgccaggacctctgaaaagggtccaggttggtggactccaaatcaaaattcatagtgaatgaaacctgaatattaagaaactaactctgtaagagagttgtctctttttacatcctcagtaccaccacatttccccctttctttctaaggtgagtttcctgaaggtgaggtgggtactcctgctttgtgaacttccttagatctagagaacttacctttgctccttttcccatctgactttcatcatcttcagtcaggtacttcaatgaaaggagccttcaaagaaaatgaacctaacaaaatttaaatctgagcgcccacggttttaatatctttcattttcctcaatctttcttataccagatagaatcagtaatagctacttgatggatgtagttcccagaggcctacagtgaattttctctcgatagtctttctaccttgatctcttctaggtgaagagatgagggattgttttggatgtttttgttttgttttccaagagattgtgctatgccagtttgctgtacaaaaagaagagtctcttggacagccaatgtattatgttttagaattgttctttgccctcatatgtaataattatgctcatttgtcaacaaggaagaaaaaacaagaaaaaatttagatggtgttgaagaacagaatcctactaacaaccatagattttcatgacagaatttttatattgttctcatacaggatgaagaggaagaaatcaaacaagaaattaacatgttgaagaaatattctcatcaccggaatattgctacatactatggtgcttttatcaaaaagaacccaccaggcatggatgaccaactttgggtatgtactgccgtccaaatttgctttatttacataaaaaacaaacacggccaaatggttcatttttctatcctcatgacaaaatttgattaactccttctttaaccattagcccccatgatgtccgtaacatattgttttcagggttttctcccatttccttgaatatctgtcttttcaggatctctaaatgttccttctatcccttaatatggaccatccccaaagccaattgttaagttctctgtttttttttttttttttcactaattgacaaccttttattgtgttttattttaggtgccttggtatttacattttatgaattgtatcatttattttgcttctttgagttaggtattattctttccctaatttcttgaatgatgcaactaaggtttacagaaaaaatgaataaactgttccaaagtctacatagctagcagggatggatctaggatctaaccaagctctatgcgattctctgtctatcgctgatgagtgggcgactgaaacataaactttaactctgtaagtaaaatacctaatacagtgtctggtaccaagtagggactctgcaaaggttgttttcctttcatgtttcccctagtccacttaggtatgtgccacagtcctttatctttgacagtctaagaggcagctctaattggctgtcccaccaatgagtttactgtgtttgataccaaagcctgttgctgctgtgcggagccttcctggtttctgtccttggaacttttattcacttagtccttcagcaagattataatgctgtattggtttggccttcccttgccaattttataattacctccctagtatgggcccattcagtggaagcctggactttacaatggcctcctatgtgttgatctacttttctttcactctttcttcttccctctaccttctgtccttccgtccctccttccccgcttcctctctctcaatttctgttcatcccacatgtcgttgttatattaatgcttctaaaaatacctttttaacctcttactgtcttgctcattttccagaggttttgtatgtgcctaacacacaaaatttactgaattagcaagagcctactatatgccaaatactgtgctgagctgtgtggatccagtaatggctatttcatggagaattcccaaagtactcagcctcgggcagaagtaactattttaatgcatcagacatttccaatccagtggggaagacagaatatagacagtgaatgcaatcagtgaccaaaaaagatataaaaatgttagctcataaaactaacaagattttcatgtcatttaatatgagtactcaatctttggaaatgaaaagaaccattgggattttttttttccataaggctcatctccaaatttaaaagaaaaattatttgggggtaaacacattttatatagtttatataattctaaaaaagttacagtaggttttaattgtggcctctaaatgtataatagatgtaaatatgaagattcaacatataaaagtagtgggagaaaataaatatgactggataatcctaaagagagatatatgacaacaaagggatacaccataaaatataattttgatggacttgactatatacatgttttaaatgtcttcttaacaaaaaacataaagtaaaaatgcaaataactaagtaaaaatattcattttataatataatgagcaaagaatttagcagccttcagagatgaagcatttttataaatcaataggaaaaacatgaaattactaatagcaagattgagttaaggaaatggttacaaccaaaaaagtaagcaatatcaattatcagtaaagttgtattaaaagcctattcttactaacaatagaaatccacaagaaaaaaatagataccatttcttgcctagtaggctgtcaaagatttttttttaattataatgtctagaatggacactcatacccactgctcatggaatgaacactggtccaacttaagggcagttggcatacacacacacacacacacacacacacacacacaccccttccaaagcaaacaccttacttttgactccctattttcacaggcaggaatatgtcctaaatcaggtcacttatttaggtaactacataaggatgtatgtagaagttaaccaatagggagtcacttacgggacattgcagacatttaaaatgatgtagctctgcatttataaatggataagcattaacaattttagtaggggctgggtgcgagggtggctcacgcctgtaatcccagcactttgggaggctgaggtgggtggatcacttgaggtcaggagtttgagaccagcctgaccaacatggtgaaaccctatctctattaaaaatacaaaaaaattaggtgggcatggtggtggctgcctgtaattccagctactccagaggctgaggcaggagaattgcttgaacttgggaggcggaggttgcagtaagccgagatagtgtcactgcacgccagcctgtgtgacagagtgagactctgtctcacacacacacacatacacacaaaaataaaataggactttgtaaagcctgttgaagaggttataattagatatagtatgttttcatttttgtggaaaaaatacgtagtaacttggtggggatatctgatataatgtatactaattgtgttgaaaatatttgaggtagtaatttcagtaatttcattttaaaagcatttttcttttttacatctgctttttttttctctaatctttctcttcagtacattttttttagagacagggtcttgctctgtcctccaggctggagtgcggtggcaccgtgatagctcactgtagccgtaaataccatagctcaagcgatcctgctgcctcagccttctgagtagctctgactgcaagagcacgccactatgcccagctaatttatttatttttttgtctcactttcttgcctaggctggtctcaaactcccagtctcaagcaattctcctgccttggcctcccaaagtactgggattacaggtgcaagccactgcacctggcctgaaatttctcttaagttcagcatctgaaccctttctgctgctgcttttgttattgctaccaccgggctgttcttgctcctcataaaagactgtctgctctctgagggcaaggattgtgtcttttgcttccctctgcagcatttggaaggcactgggtaatatgctgacaaaatcattggtttatgaatgaaaattatattgttagaacaaaacctggttgcaacaggtacttttgagagctcagattccctgaggcctgcagattcaacaggatatgatggggtggcatgagttaacatatctttgtgtttccaaaggacttctacattgtcaacaatttagcattttagcagtgactctgaattgccagaagctgcagcagatgacacgtagagaatgatagctattatcctccagctcattatcagcaccctggaagtcccccttgctctccctctcaatcactgccacctcaaggaaaacgggtatcctgactttttttctcccagttgtattaagatataatcaacaaataaaaactgtatattggctgggcatggtggctcatgtctattatcccagtacttttggagaccaaggctgggagggttgcttgagcccaagagtctgagaccagcgtgggtaacatagtgaggcctcatctctaccaaaaaaattaaaatttaaaaaaaaagaaaaagaatttgtatattgttggtgaggatgtagagagaagggaacccttgtatgctgttggtggaaatgtaaattggtacagccatgtggaaaatactacagaggtttctgaaaaaattggaaatagaactaccttatgatccagaagccccacctctggatatatatccaaaggaaataaaatcagtatctcaaagaggcatctgagctcctgtgttcattgcagcaatatttagaatagccaaggaatgatagctattttatagttgtctgtagaaaggtgttttctttggtcagggctatggttctcaatttaaaaaaaaaaagcattaatgtagatttataaccatctcccagcatatcacctgagctagaacagctatttctagatgagccacacctagctattaatttcattcattttgtgagatgggccagatagaaaagttggttttcatgttaagttgaattattaaaattggggtaattggggtgtttatttacgaatcgttggttgagggaaggagaggggtggttaatagggcttgactctttttcgcccttttgcagatcctgagatgttttaagttggaagaagaattagtcatgataaactttgctgggtccagtgaagttaattgactttccccgggcctcaaaactcattagtggatgatgcaggaccagattgcagacatcctaaaacataacactttagcttggttggaagttctgtgaaagccccctggaagtttttgttaaaaactgagcaaaatcttcagtccattttcagataggtacttggagaaagcagcacacctgctggcatctgcatggtgttaatgggaggtattgtactctggaaatgagtcacttcccactagttctcaccctggccaattgctcttctcatggagatggctgttgttgctgggaaccaaaagcctgatgtgtatgtgttcatttatttactccccagtcattcattcattcttccatatatatatatatatatacacgaacatatatatctccatatattcatttatttgtctgtgtgtacatacatatgtatatgtatatattatcatatcatcatatatatacatggctagtatagatacatatatatactggctaggcacaaggcactcttccaagcactcaggatataacagtgaacaaaatttatgaaagtacttattttaatgcagcttacattcttgctgtagactacaaacaataaacataataaataagacaattacagaggatgctggaagctagtaagtacctggtggagtactaattgggaatgcaggtaagggttgcaatgtgttatggactaaacatttgtgtgcccccaaaattcatatattgaaatcctaactttcaatgtgatggtattaggaggtgaggcctttggcaggtgatcaggtgatgagggtggagcccttataaatgggattagtgccctcataaaaagaacccagagagctcccttgctgtctttctgagaagttaacagtctgcaacctggatccagatcattcagggctttgcaggccattggaaagacctcggcttttactctgcattaggtgggagagccatggagggttttgaacatggagtgagggggatgggatctgacccacatactgaaggggtcacttcagttgctggcttgcgaatagaccagatgggtcaaggagagaaacaggagaccagttaggaaactgttttagtaagtgaatccccttcctgaacttgatgaaggggggatctgcaagtagtgagcacttccaaactggaccacatggggaggaattctgccatcacattcaacttaccccacttcaattaaatgcaattaactgcaggtaacaaaatgtggaagttacagctcctacattctgccaggtttgaaggacaaagggcctagcactcgtcagactcgcgtctatgcagagggctgctctgaccatcccttctagcaattgtctagtagcttctttcttaccaaagatgaagataaaagctatgaaaggcctcataagggcaagagcgtcatttcttttcctagttgattgatgtggtgacaaatcaagaaagaactaggaagaagaaagacagaaacataatagttaggaaattaatatcagattacaatattggtgggaacacagtcatagaatataacagtacatacttattccaaggcctctgactcactaaatttggggcattctctgttaataagaacaatggtaggaaatatttatcacctgcttaccatgggccaagtactatgcttgtttactttgtcatattatcttattagatttttgcagccattctgcaaatcaagtattatccctactctgcagatggaggaaactaggctcagagagtccagaagtttgtccaaggtcttatagcaagtccgtgatgaagccagcatgctagctaaccccaagctgtctgattccagaatcaagcccttaaaccctacactcttctcctttggtcatgaaaaatagttctgatatcagaagctgatgttctaaataggattgaagatttatgtttaaataaatttagtttaacttcacctttaatctgtactcctctatttacccaatattcaaagagcaagtaagacctgttagctactaataagagtgctgtaaactctaagaaatacattttgaaaagtgcgttaggtgctttgggaatgttttatcaaataattgcaaaggtcatagatagttgactcttcagactagtggcattttgttaggattacgtttgtataaaaatattatgaattatatagaggcatggcctaaagcaactaaaagcagcactttctaacatttattctctgtattcagactacatgaaatattccccagatatttattttgctatggctggaggacaggtttgcatatatcccactagccaatgtatgtcctgtttcaggtgtctgattgaattataatctgtacgaatcctatcagtcttgttgtagagataaactcttgtttagcactagctctttgtggaaatacaactacttcagataatggccaagtaattctcctttatcaactgctcagggtctgatccggaaatcaaaaaagggagccctttcaataaagattctgatctctcggaaacaaggcaagctctgacacacaacatctcattctgctgcctatcagtgatgagaggctctccattttgctgcatgccattcagacactgggagggagggagaaatactgtttagtaaattaactaatttctcaaaaattacaatgtgaactcacacatattttgctgtcttttttgataccaccataatacagggctagaatatctcgtaacaggaaataaatttgtaatcatcttctgaaatgtagggtggtcaagtaagatagcagatttttgccctgtagcggctcaataatctattcatcaagttttcacacggtacacttgcagagccaagacttaagaaattataccgtgtgcgttttaaggacaaagattctgacagcctgggaatctggagacccagagtcaaacctcgggagaaccaatgtgtctggcatttggattctactttataaaaatgataatattagactagttcttagttggcaaactggcagcctagaggctaaatgctgccatgataaatatgttgagtttggttcacataaggtggtggtggtttaattatgccaacattagaaaatttgagcagtttcacagaaaagtctggattcttgaaaagttttgaaaaataaaatgatctagaaatattgggcctgaaatttcaaatagtagcagtattttagagcagtgtaccagctgtttagagggcacatatcaaatttgcaccagaggccccaacatcccctgttgtcttccatacatactcaatttcatgtattcacattacttgcccagcccctgtgtaagatcgtctcagaataagatactgggatgaactaagaaacaaactcattcaactacccatgaaaggtcctttttagactctgcattgatgttggccacaactcctaaacctaattctgcagtattttggatttacattgttatagcgtcttggcttggtaaaaataatgcccacttcaattttgattgttttaacatttaaatgttaggtactgcagataatgccattaaaaatttaaccacccttgtgtgacgtggaggttgtaggaaaaaaaaaaaattaaccactcatagctgaatcctttgaacagttaaaatttatcttttgttaatgctgtgtatcagaaatgaggcttttaaaacttgttttgattagtgtttgttacttttataagtaaacagctcctttccttcatatacagagcctacgtcacttgtctggaggagttatttagtcttgttatttgtgagcagaaatttttaaaaggttgaatttggcaaatatagatatgcctaacatggtaagaggaatgattgtaaacagtctcccagtttcagagctgccacattgcaagacctatagagacacaaggtaagttacgtagatacaaacacagatctgaagctacacgtaacttaataccttgcaactggtgtgtgttgagctttaatagagctattttatgaattaatgggtgattctttgataagaatgtgcaattgatctcttcttttgtcccaaagaatttcatttgaactttgtttaaacttcttttcatctaagcaaaaggaagacttgatatgtacccaaagttattttgctaatggtccatacaacccttttgattcctttttttagataacttttgagccaaagtctatgttcctatttatattgtgtttctcaaaatcttcagcaatcaagatgattagtcctaaatgctctaaagctagcaatttattttcttttcctattttcaacctgtctgaaaactggctcaccattcctcaccccacattcttctatttgggtgtaacattccgagatgcagagttgcaaatttcttcaaccttaaagttagcttctatgattggatctttggacaaaattgacatgtagtgacttactcctaccaaaaaaaaaacatatatatatgcagaaaattttgcattcatactgtggaatttgagtccagacaccaaatacaagatgcagctaatgtccgtaacgtttctttaaatgctatcgtactgactctgggttgtctgtctcttgagacataggcgacttgagcatttgtagtgggcctgtcctttgggcagacttgttgttgctaaaaatactagttggctcggtatattcaaactgtctttgccatgttcaaggtagagagttgttcactatccagaagctttattacaaagtctaggacacttcccatccttggaactcatctttttgtctttggaagtcttaaaatttatagttcaagcattctctttcccagtcgaaaaatataattcagaagccaagagtttatatatagatagatagatagtacatgctagtttaaaaatgaatgtaaaaggccattaaagttgctttttaaggtttgaaatccccaagctttacttcaattgattgaaatgatacatgtattcaaatgtatacctaccaatttttgtattttgtatttctatacacacattttatattttgagacttaacctaccttttgcacataaagcagccttctgtaccaaagttactgagtttggactttgtttccaccatcataaatcatgcagatgagatctgtggttattttcagccacacatgatgaaaatactctgtgcctcattgatgtttctgggttaaatctttgcagaattgtgttcttggaagtttgttcttcctattatttatttttatttatatttatttatttatttattttgagacggagtttcgctcttgttgcccaggctggagtgcgatggcttgatctcggctcaccacaaccttcgcagcctgggttcaagcaattctcctgcctcagcctcccgagtagctgggattacaggcatgcaccaccacgcctgcctaattctgtatttttagtagagatggggtttctccatgttggtcaggctggtcttgaactcctgacctcaggtgatctgcccacctcggcctcccaaagtgctgggattacaggcgtaagccactgtgcccagcccctattattttcttagggtgccttttaaactgcttggtgcaaacccttctcactttaggaagaccttaatcttcccgcttgcacctcttcctgccccctgcctccaacccctccttttaccataaaagagaagggatctgttagtagtcatttattcttgtgggtgactgactagtgacatttgggaggaattagttcctgtcagggtattctgggtaagtatctgcaattgtgaaataacatcctaagagttcgtttctcattacaggaacttaaaaccaataaactagcaagggagtgaatactttagggaccccaggaatcatccaaacctttgactgcctttgagactaaatcttttaaaattcttttagaggttattagggcaggaaagggaagtttagaagccaccacatctggtgattccatgctaaaggccccctgtctcttgtgaagagataacctcaagcgctgactcagtattctgaaatgtcttctggaatcagctgaggctgaggaccctttacttaaatattgtcctggagaggggagaagcacaggaaggcatactaagtaacccctgaccaacctctatgagaaaacatcctacgagaaacatgacaactgacaaaaactgctgacaatcaaccatgcaaattgtgaagtgtcagaactctttggcttttaaaaattaacctttgttatttagatagtaataattacccatgtctaaataatccaagcaattcttttctctaataagttggttgctccacactgtgctttttttggacacctcctccaggctcaggcctagtcctcatcctgcccccaaccaccttcaacttgaccttccttctttcttctcaagtggtatgcatgtttatttaagtttctgacccagttatttatttaggcggtgttgagtgaaaatttcaaatgttagattcctttaaaattcctccaccccctatcacccctgccttccaaataaaaagatccattgccctggaatgcaccactgtgtcttcttgctgtgtggtacaaatgtaaaacaaaaacaaaaacaaaaacatgtgtctctggtgctttttcattaatagaggttttagaaaaatgtgcccagtgccttttacaaatatctttcagccctgtctcttcaccatccaagtgaagtggacactggggaggtattgatgctatcttccatgtcagaaactctttcttttcgcatttttataaatgcaaaatagaccaaagaatagaaacatcataaatacatcttgagatttttggctgctagcagcattatatccatagtcacaattaatgttcacatcaaacctgtaaggttgatgcttttattttgtattttatcatagtggtagtggtggggagagagacattgctaagcccagggtggttagggaacatacccaaggacacataactagtaattgagagagcaacgtgctttcaccctgctcaagttacttaatgagtgtagactatggataaagtgcagactgtaagctctatttccaaatacagaaaaaggaagttaggtgaagaagaattaacgaagcatttgtaaatcgcttcacccagtgcctggcacatggtaaattctcagtaaatgttagaaagtattattatcccagtataaactctttgagaactttctttcagggagaattttaatgacccattatttcttactagtgagatgtgaagttattgacttatcactgctgagcttggcatgttgagctctgtttctgtttattaatgtgatgaggttacttatggggagggaggatccctgctgtgtggtggcggtaattatcagcattgctgtgtggctgtaggaaccaattgctagcaagtgctgttttttttcttttttttttttaaatcccattatataatttaacaatcattttgttccatagtgagaggaaaagaatttagcagccttcagctggagctgaatgggaaagcaaattatagaaatcactgacagtagtgcctggctagagtaggattgtttcctactgaatatttgaaagtatgttgtccaatctaattttgaaagactcgagtcactgggcttccattgccttccttgggagctataattacatggcctaataaagctcagtggtgggacattttccccagctgatacaggagcaatggatgtattcacaggaggcctggtcaatgtacttttcaaaatgggatttagagaagggacacaaacatgttttgctcactcgggaaaatattcatttcctgctatcaaaagatgtttctttggtccatcctgctggcattgaaccctgatttgctatataatgggactttctttaactttgtattgtggagaatcctaaaaatacacaaaaataggcagaacagtataatgaacacctatgcacccaaaactagccccaacagcctttaatcagtggccagttccaccccatccacatgtccatctatgttgccccttctagttattttgaaacaaaacatgtcattttttaaaattttggtaacataaacataaaatttacctaaattttaactactttagaatgtataactcattatcattaaatatagtcacaatgttatgcaaccatcatgagtatctagtgccagaacatttccatcaccccgaaagaacactgtgtacccattaagtagtcattcctgttaccccctacacccagtccctggcatccactagtctgcttctgtctctatggattgcctattttggatatttcatgtaaatggaatcatacaatatatggccttttttgtctggcttctctttttttttttttgagacggagtctggctctgtcacccaggctggagcacagtggtgcaatctcggctcactgcaagctccgcctcctgggttcaagccattctcctgcctcagtctggcttctcttttacttagcataatgttttacgtgattcatccacatatcatgcatcagtatttcattcctttccatggctgaataatattttattgtatggatatcccacattttgtgtacctgttcttctgttgatagacattttgtttttttctgctttttgtctattgtgaatagtgctactttgaacactcatgtacaagtttttgtttgaacacctgttttcaattcttttgagtatacttctagaagtggaattgctgagtcatgtgtcaattctgtgtgtaacttattgaggaacccattaactgttcaccgcagtaactataccattttacattaccattagcaatgtatagaggttccagtttccccacatcctcaccaatacttgtgattttctgccttttttcttcttaaattaacatccatcctagtagatgtaaagtgatatctcattgtggttttggtttgtattttcctaatgactaatgacatcaagcctttctacatgtcattgttagccatttgtatatcttctttggaggaatgtctattcaagtcctttgcccatttttaaattgggttgcttgtctttctgttattgagttgtaagagttctttatatattctggatagtagacctttatcagatatatgatttgcaaatacttttcccattctgtgggctgtcttttcacagtcttgatagtgtcctttcattcacaaatgcttataattttgataaaattaattttttcttttttttttattttggtgcttgtgcatttgttgtcatatctaagaagccattgctaaatctaaggtcaaggagagttacccctatggtttctcctgaaagtttgatagtgttagctcttatatttaggtctttgatccattttgagttaatatttttgtatagggtgtgaggtaaaggtttaacatcatttttttgcatgtgaatatccagttgtctcagcactatttgtagaagaaactgtcatataattttatccataagtatttcagcatttttctctaaaagataagaacttctttttacaaaactacagtaccattattacacttttaaaatactggccaggtgtggtggctcaacgcctgtaatcccaacactttgggaggccgaggcgggcggatcacaaagtcaggagatcgagaccatcccggctaacatggtgaaaccccgtgtctactaaaaatacaaaaaaattagccgggcgtgatggcgggtgcctgtagtcccagctactcgagaggctgaggcaggagaatggtgtgaacccaagaggtggagcttgcagtgagccgagatcgcgccagcctgggtgacacagtgagactctgtctcaaacaaaaaaaaaattaaccagatttcttgagtatcatcaaatatctaagtccgtattcagaattgtaattatctcaaaatgtgtatatctttttttaaaaaaattaatatctaaataaggtgcacccattgcaatttgttggtgtatctaagtgtttttaaatctataagttttctttgcgtctctttttttctcccttgcaatttatgtgttgaaaaaactctttgtcttgactagtatcctggtctagattttgttgattgtatcctcatgatgttacatgttcctcagtcctctgaatttcctgtaaatcagtggctggagctagaggcctgatcaggttcagatttctgtttttatttttggcagtactacttcctaggtaatatgcgttcttataccaaaaggcaaattctatttacttttttatttatttatttttttctatttactttttaaaatgttaacagtcattgatgatcactgcctgagtctgctagcttattaggaggcacaaaatggtggcattcttctactatgtcttcttcatttattagatggaatacctacttttttatgaacagaaactttccctcttttattattcaactacccagtggtaagatttgtattaaaaaggcagtatagactcttcagtctttccttttatttgtcagctcttagttagtttgttatttttttctaacagtgccagtcatattctttgggtggtgggggatgaccttgttaaggcatttaattaagcacatttaaagtgtttctacacattacagctattattcttatctatgctcagattatcccatctttcaccactgggagtctcttgaaattgaatcctttttgacatgattttgtggtctttgatagtttctgggctattacatattgtaatttcccaacttttatctggttggaatgtagtctacttgtggcacttcccaaatttccctataagcacttataggtcttgaaacttccttggcttcttggagaaggtgggaaggtttccctagccgttgtggaatcataagaagacaagtcagaacaggctttggaaactcactcatgaaatgagtttcatgagattttatttagtttctattaggtatacaaagaaaaagaaaatataatttctgcctgaagattttggagcctgatgaggtatcttttaggacctggaaacatagtgctgatatcaggaatgtagatttggacaaagccaaagccatcaatgtggttttattgtggctccattttagttctgtctctactactaagtcaggaattgattgctagttattctgaattcttttcatataattataaaaaatatataagtacctaataaggtgatctttgttgaagatatttttgaaggtaaaagtctggaaatggatgtgtttttctaagcctagaaaatgcatgtaaaagcacatagatggcttttttctcaaatggtctctacatccccattgagtaagggtgatgtttattttctgcctattttataagttgctaagtagtgtaatgagtttatatttatagagtgcttggagcttttgcatgaaaggtgctaaattagagtttattgtttattgaatttatttgatgtgtccaacctcctgggaacattcgctgaagttaattaaaaacagatagttcccacactgacagcttacagtgccacttacaaaccagtaacataaacagtgtgcacttttgtaaccctaagttgggacacctagagaaccacagttctttctgataggggaataatcctacttttatgtgaaaatttgactgctgagttaaaacagagatattctcaattttgtctgagtcacctacctactcccattaaaaaaaaatacttagaatatggagagtttcctcaattttcaaatataacttacaggttgaaaaatttaaaaataatgtttcctttatatcattttgggagtacatgaaggtaaaagcttgtgttttatatattgttttatgataactttttctttgcaggaatggcattccaaagcagccaattgcttgtgctttcttaccccaacttaatggaagcagtgaagcatcattaaaataatggcttgtttgcttcctttgccagttggtgatggagttttgtggtgctggctctgtcaccgacctgatcaagaacacaaaaggtaacacgttgaaagaggagtggattgcatacatctgcagggaaatcttacgggtaggttacgagtggggactggcccacctcccaaagtcttcaagcaacacatgatatcttatgagggattgaatttttttctgactttctagtgaaattcataagcatatcaaaaaccctttaaaagtttatcctatcagtggtggtggtggtggtagtggtagtttggtgtgaaggtctgctctgatggaagtgagcgccattctggagataggccatgagcatattttcatttaggttgacattgggtgatttctcttaacaagggattcattttcaatgctgtttccaattagaaacctgattttagatcataaagacagtgttccacttaggaaatgaattattttatgagatattttaatcactcatttaagttatctgtttgtgaaagttcacaattaatatattatccctaatggtgtaataccttcccaccatataaagtttataaggattgtgtgactttagtcattcctatacatacaacctagtttaaccgattttacctttaaaaaaaatctttgtgacctaatcacttaaactaatcaaaatagctgaacaagactgcctgtttgcccagttttcccacacatcccccaatcaggaaatctagacaatagtatcatatttgctgagctgagttcaggaagaagaaagtaactgggcatattttagttcattcagactagcttaatcatcccttcctactaatatggaggttattatatgtctactgagcattcttattaaatcttcctggccattgttatttatttataagctctgccttcttaatttaaggcaacaaaagttaaaacttttttactgtgtgttcaagatatgcctttgagagatagattgtatgctttgggtggatggatgaaatggatagaagttaaaaaagaaggaaggcataagaagacgatgtctgttcattaaatgcaaaccaaattaggcaaaaggcaaatagaaaatggaattttaaaattataacattgatgtgaatgacttctatcctgaaaactacaaaatatcactgagaaatattaaagaagaccttaataaatggaggtgtacattatttcacagattacccaatattctaaagacatcatttctacccagtttgatccatggtttcattgaacttccaattaaaattcctataggtatatttgtggaaatttataaagctgattttcaaacattatatagaaatgcaaagggccaagaataaccaaggcaatcttgaagaagaagagcaaagctggagaatttatgctaccagttatcaggatttattataaagctactaataaattaagacagagtagtattgttacaagattagacaatggccaaaggaacagaatcaagggtccaggaacagacccacatcatatggatgatacctggtctgtgtcaaaggaaagggttcttttatcagtaaatagtacttgatcaattgaatatccataagaaaacatgaaacctgacacctgctacataccatattcaaaaatttattccagctgggttatagatataaatgggaaaaatataaaaattaaagcacttaagaaaaaacacatacatccatggcttgggataggcaaaaatataaattatatgttttgtgttcttaaacagaacataacacaaaatttgaggggaaacaaggaggcctggctgctgatttccttcacatctgacgtttatctctgttttgatgtgccattgtgcaaacttactttgaatttctgacttaaaattttgctcattcagatagagcataatggattatttagtcatcctgaccactcagtggctgccaagaacctgtcaggtctctagggctggttctgcccaatatgcctttctgcactgctggggaaccctacagaggatcagtcatttgatctaatcttcatggttctaaaagcagcagggatgtttcatcacatgagcatctctcaatacctttcacacattctcaatgtgtggaaacaatggctttcctcctttttccagtatattctccgaaatgataccagcatttcagacatgactcactggaagagacatttgatcacccaaaggtctctggccacaagaggttttggaggtgacctccatgcattgtatgatctcattaaaagaacttttggctcacttccatgctctggtatctgctttcaaccacttcagtagtgaaagagggaaagggatcttcagtccctctcttaaggatttatggggtacataaattttgtgaaaaccacacatttaaacccctgatgcctaccctgtgacaaactgaacagataagaaaggcaattttttaagacctaaaccagtgcctcaaacccttctataacatggtttatgttttctgatatctctaaatgtatatgtgggtctttttggacctctgtactctcatgctgaatttctttgacaagagaattcagatatctaggtttgtttcttttcctgtcaacctcatttttcataccatgattttgttgttgtggagaagatgaaaagcacaaaaaattaaaggtaataaagaacactcggggacccgatacattgaattatcaggtgttagcataaaataatttgctttaagactccatttttagattattttagattataatttatctgaaaaatatatgactactttagagtaagtctgtaggttaaagaattcacaccacaaagaagccaaaaacagagtaattcatgaagaaatggaacacaaacaggtttagttgtcactgaataattctcacataatgagcacaaagtcacaaatagcataaactagcataaactaaaaatgacagtgatgaatgccaacaaaagaaatagaaactgtattcctttttaaatgtaaggcacaatgggtaaagccaatgggaaatttcttggctggtctgagaaatattttacttcgcttaattaaaattgtataacaaggccgggtgctgtggctcacacctggattcccagcactttgggaggccgaagtgaatggatcacctgaggtcaggagttcaagaccagcctggccaacatggtgaaaccctgtctgtactaaaataaattagcctggcgtggtggcaggcacctgtaatcccagctactctggaggctgaggcagtcgcttgaatccaagacacagaggttgcagtgagcccagaccacgccattgcactccagcctgggcgacagagtaaggctctgtctcagtcaatcaatcattcaatgaaattggataacagaatgtaaattttaacttttaaattcaaatatcctgcagggattcagttaaatcaggttagttttctgtacagagactgtgtagatggttctattttaaactgtttaaacttcgcttttcacagtagtattaactgaaactcatgttcatgttggaaccgtataattacttgtgtggttccctgatacctgataatcagatccaatatgcaagcatttcattaaacacagcaccatgcattgcaaggactgcctgggtactttaatttatattgatgaattgcctacagttagaagagcactatgagcacatgaaagatgtgattataattctgaaaagtatgtctgggtgagtgtaaagtttttggatccttaacagtcaaaataatttattggcatcttggcttatgttcctattaacccttcttaactctccatcactccaggggctgagtcacctgcaccagcataaagtgattcatcgagatattaaagggcaaaatgtcttgctgactgaaaatgcagaagttaaactaggtaagagcagaatcctgtgagccttggaattgcaggaagtgatgagattatattaacagctctaaaaaaattaatgttaatttgtcaccgtggatttggagagcattgccctaaaaatggaaaggaaaatgtttctttgcctattttaaaaaatattttctcaaggcattctgaggaatgaattatatataatgtgggaacagaaccacttgcttaatcaatatatagaaataattgagatttttttgtttcagcagagattagaagtgacaaactttgaaatggcctcctatatcttacagtttgtttatactgttgctgctataacagagcactaggacccaatttttttccattaaaatatacacaggcatattcagaataatcaattcctgctatattcccataggtttaagttatatttacattgattttgttattaccttgggctcccgtgcaaagtggatacttaatattctactttaggtgcatactgattacccccacttccatcagtgggagaatccttctctttggcgtatctgttagagctctttccgcaacaaatctgggactgcccaaatagagaattaccacatgcatttgactgcttgatgtatatgagtaagagcatgaattgacaaatatccagtaggatatgtaacttgtcatctagaaaagaatcgctgtccatatgattgtatattttcaaagagatttaaacatcttctatgtttatatcccaaacatttgctcttcctttttgttgaaatatatgacttccattttttttcttagttaacatttgggaccaaactttctcacctcatgaatattctcttttaaaaacaaaagtatacattatgtaggctaagcagttatatatgtatcaactagataagctatcctgagagcattcttacttcactaattaacagttacttgttgagtatatattatatgccaggccctgtacaagacaattttctatagattatctctcataaacatcagagcaactctgtgtagatgtcatcatcctcattttacagattaggaaaccgaagctcagagaggttgatctactagccctaggtcataccactagtagcggcagaaatgagatacaaacttaggcagtctgactcagacttttgcttttaatcacttgtcttgtatccccaaaatactaccctttctgacaaccaagcttacttttttttaacacctatttttggtccctgtgaagccttggtgtaatcaaatgtaattctttgtgccttcctcatgggtacacttcatccatttctcatgcagtttaaaaacatattcacaatatagaaaaggtagaagcaacccaggtgcccatcaacaggtgaacagataaacaaaatgtggtccatacacacaatggaatattattcaaccttgagaaggaaggaaattctaacacatgctgcaacgtggatgaaccttgatgatattatgctaactgaaataagccagtcacaaaaagacaaatactgtatgattccacttatacaaggtagtgagaatagtcaaatttatagagatggaaagtagaataattgccaggggttggggcaagggggaattgggagctattgtttaataggtacaaagtttcagctggggaagatgagaaattctggagatggacagtggtgaaggttgcacaacagtgtggatgtgcttagtgccccagaaatgtacatttgaaaatggtcaaaattgtacactttatgttacttatgttttaccacaataaaataattcacattcattttatcgctatctaaaacctatgatcacagactttatttacttgtcttttcttaaatagtggactttggagtcagtgctcagcttgatcgaacagtgggcaggaggaatactttcattggaactccctactggatggcaccagaagttattgcctgtgatgaaaacccagatgccacatatgatttcaaggtatggcttctttgtcgtgtttcaaaactatgcctaccatcttatcctgagtcttataaagtcttacatgcccttatatttatgatttatgtcacccaaagggagaactgaaaaacattatttgagtttaagacctgtaagacattcaagtgaggatctttttaatgaattcacccatcttatctgatggcctgtttgtaaaaaataaaaaaataaataaaaagtttaaatcattttctatatttttttaaatttactcttgcttcttattattggaaaatagattggatttccattttggttatggtttagatttttggaagagtatatattctgatagctttttacgttaaactaagatgtgagtttgttgtcttgggtcatctttttctgattgagaataatctgacttacttctacaatgctcgaagtataattatctggggtttctttttcatgagagggaatcagatggaatattggtgactactttatggtatttctgtcgtgtggcctgatgtttcatagaaatttgatttgtgacttgttactttatattataaactagaaatttgctaatacattcaaagctgtgttcaaatagatttctccaagaagcccttctcttttctattctgctagccaataaccaaacataattttgcattattgcccctcaggtttattgtctggactttcaggtgacacggctttctaatgaatggtgactgaaagtcaaggcaataaaattaggggcaatgggatctaggaactgtgtgtgggtttccaggctgtgcattaggtagagagacaccctgtggtctttgtgtacattacaggacaacttgggcaaaacttgatctgcttgggctggtttcagaggtgcatggacttttcaccaaaacactttaatgatcctctgtaaatactcttatctaacagatgaagaaactgaggccgaggtctgcaggtgctcaccgggttagcaatcctctcagagttagcacttgaatgcaggtctccaaactttctgttcagagccctttccaatatattaccttgctcctctgtaatgtacttccatataaatctccaatttatcaattgaacagtatatttgaagaatatttcacttttaaggaatatttttagttctcgacatgtggggttattattgaaatcaggtctcaaagatgcaaacattgcagcgtttttgaggccccgtatctcagtgttgacagaaaatttgcctcttttgggaattgcaagcttgaaggtctgaaaacctaataatctcccataaatttcctccttccttcaaagttagtcactgtaataacctgacaacaatctgtctgaaaacagctgccaagttaaaaattaatctcctgccaaaatgtcatttttttaaactgctaatgataagcatatttaaataattctgtttgcaaatcccttcagagaagccactacaaaatatacatcccaggccagatatgggtatcatgattagctacaagcaattcttcaaaccatagttatacctaacaagtgctaactagtctacatctgggccacagatattctagattactatgtaacatagcatggggaaacagcgtttgcagctcttacaacctcagcttaatcttttaagtattgtgactgactgcactatatatgggacttttgttatgtaaataaagtgggtgcctacaactgacttgttttcagtagggtatctagaagaggctttccttctggccaagccaaagcttggaattaaactgatattttggtcctctttcctcagattatggctaaggagtatagtttaagatcactgtaaatggtgtgagaccagtgcataactctaggtatgggcaaatcctgttgtatgagtagccacagaggtcgtcatgctgcacagtgatttcagaggtactggaaggctcacctggctataaaagtatcctgagacattaaaaagattgaagatgaatgtctgtgtgtttttttaaaaaataaagaatcctgatagaataggttcaatggtgtcagtcatttagaccttagtgcaaattagtttaacaggattgtcaggaatgtaggttgtgcaagaggaggaaaaagtcatggcagggatatgagcttcactggttatatgccatgggtaaaaagaggaggatgacaaaagaatgaataaggaagacttttctacagaggactttataatattgaattattttaggtttttaaaaaaattcatagtggtcttcaaagacatcttagacaaatcaaatagtaaataataaataacaaaaccaagccataccctgttggggtatagtggaaggtttggggattctttgcagatttatttaatccacttatacagttttactgtgggccagagaagatgctgatctttaaataaccttactacttctttcttggcaccatatatcatccccttttctgttcagtatccttaggaatgtaacctgtcaccaggggacaacttgacaatatgctgactttcaaaatcatttattcattcactcagtgcatatttatagactatccattgtgtataaggagttagtcaagctgtatctgtacatgcagtttctgatagaaggttcatttgagaccccatcaaagcccgaggatttcactgtgtgtttggtggtccacttggcccagtggtgtatcccagccccagaagcttgatgtcaacactttgggccctcatgtgctatagccactttcagccgagagtgtgtatttagaataaaggatgacttggccaccggactttattagatttcttaccacaaaagtcctttctgtaaaataaagacaagaagaaaaagaaaaagagtatagcttagttttgttatttgatttattgtttatcaattattttttgatgtgtctaagatgtctttaaagaccactataactttttacaaaacctaaagtaactcaacgtataaggtcttctgtagctttttattgcagagtctggttttgtgtgatatctactgggcacagtaagtaactcactgaaaatagaccctctcctaaggaggagtgccagaatctcatttgccgggtgtgctggctttcccctggaggcccttcctttcttgttttcagaaattctgtcaaaacacttcaagtgaaaggaaaggtttcatttccctgataagtatgtggggcaataatgaaagctttcccgtttaataataagcattcaaaagatttgaaattaataaaactgttcaaaatgcctaggctgtttaaattgttatttttttaacctactttgaatttcattttggttggatgggatctgctaagcattttatagtcctgtgtatttattactttaacagaaccacccactaagaaatttctgtggctgaatgccacagtatagtacacataatgtagtcttattcacccctcccaccccatagacacacacacacacacacacacacacacacacacacacgggaaatctataaagaacctggaaaaacttaatagtatttacttttgaatagggcatgtggatggaaaacttacaatttttattttctatatctttctgtcctgttatgttttttgccataaacaggccttgctcttatatgaagccaatgaagtaagagatgcacagtgaaatggcttacccccttatcccactccccaccagattcctgtcctcaggcctgatctgtgccaatgttgtttattatttgcctaaactctgtttatgagactttcatatgggtgctgcagattatttgcagacatgggtgtctcctccagcgtttgggtgaatattgtgctctggttgtagagaaaaagtactcttttcccctgtgtcacagataattggcattattcaggcagggtggaaatacttcttctaagtaagagtttcagttggaaatgaagtgagcaacctaactagtggtagagtttccgccgtgcagggtgtcacctgagaggacaatattcagattgcagaatgatgcatttacactctcaaacaagtcgtggcctctgtctactgagattcaaacaaaggtccttccctattcgatcagaaggaagatgacccagatagcatgttagtgtcaccaacaggaaactgaaactcctattcaacatatttctgtggctctctgttcacacccacctataaaggattccttagtgaaacgcagccagtacctcctccacgcaacatgctgatacccaggggaagagagtgagctattctaatattttccctttggtcacataacaagtgaaaatggacaaaaaactaaagatttctgtcctcagtttgttttatgtgtgaaatgggattattaataactatctccacttcagtgaccctaactcaccacctaagttctgtatctagataacataatatataaatatataacataattaataagagtcagtcctttgaagtcagacaggaccagtttagactttgcctcctatttgcaaattaactcaggggagttatttaactttttgtaaacctgcataaaatgggaataataaattgtttattcggaggttataatagaataaagtgagaatatatataaagggattaatacagtgtccaccacttggtaagtactcaatatatagtacttagtatatatattatagatagttttgtgtttatgttatcatatggaagtattgctatttggggccttttttttttttttttttttttaagacggagtctacctcttgtcacctagactggaatgcagtggcacgatctcggctcactgcaacctctgcctcctgggttcaagcgattctcctgcctcagcctcctgagtagctgggattacaggcgcccgccaccacgcccagtgaatttttgtgtttttagtagagacagggtttcactgtgttggccaggctggtcttgatctcctgacctcgtgatctgcccaccttggcctcccaaagtgctgggattacaagcgtgagccactggacccggtgggggccattttttacccctaaaaggcaacagtttcatacggttcaacctcatatttgtgttacacacctctgtctgcttacgttgagccagaatctgcttctctataacttttaccactcaattaagatgttgtccctagggaccatacacacaatgcatcaatttctttttcccacctggaacatttcaaaagaataaactagtcacaaataagttacccaacaaaagacgattttctgctctgtgatacagtatgctggctgtgcccattattaagctattgtctgtcaactgtggactgccgtgctgctctctgctttgtgataatggagctaggagtcagctgtcctcccttctgtttgtccatctgacttcttatcaggctctgccagcagggagcaatagagaacgggagatcaagtctggaggaggaaggaggacacacgttttcctgtttgcttcctgtaagcttcttgtttatgcctgcatggtccctgtgacctctttgaccaccactgagtaccagagctccctgtcatcttacctgactctggtttgctggttgaactgccagttgatgatatctggtcctaagggtctatctgtacccacattcgttgaatacccaatgcagcatgtactgcattgtatattaggcactttttgcatattcttccttattgaattctcttaccagtcctgcaagacatgtgttcttttcctgttgcagttcttttcatgggctcagagttgttagttgtgtcacagttgggtctggctgcagaccataggcaccttctacctcatggtgcacattggggttcttgtcttgtgccacacagcctctcattcttctgtggctggttcagacatctaaacgtgttgcttttcttcactgtgttgagcagcccagccccagaaggaatgctttcttgttctgttcaagttgcttgtgtatcagctgttccccactcccaccctttccagcagccaaaagttctgtcttgcctctgccttcccaaaggcactagaatttgtctctcttctgtttgtaatgcacatagcgctagggtattaatcatgccacaggctaggctgcacaacacctctggaataatgaattatccagcttctgccaaaatgagtcacaccatggccatgaacgaaacttatctctttctgactctttcctcatcttgttcttccatcttcccttgcttgtctcctgtgatctgtcttgccagtggtaattggagcattttctcctttacttaagttctgaagtgtctttgggactcgctaatgtatccaacggctaaacaaggcctgtcaaggacatttatggctttctagcatgggcagttgagtgtagcttacaagcaactttggatatatatgaccaggaatataaatgttccttttggaaaacaagagaaccccagccaaaaaaaaaaaaaaaaaaaaaaaaaaaatcctaacaatgatatcaaatgaaggcttaaggaagcagcagaattgactaggtcatgtgacttagcagagtatgcacaggtatttgtggtgatatgacctttggtttgaaaggggtgttctggtggcttagggaaaggctgcccaagagggattctgaggtgatgtgtactaaataaagtacatattttttccctaaaccttcttgcttcctgtggaataaatccaggattacctaacaaatgagacctctccatttccttactgtcaaagtatgttcttcaaattactgctgtatgtgtattatcacttaggaatgcttttgtctgtacttacgtttcttatgtcaccagaaatctagaggtaggcagttcagggttcatgtgatgcttcactgataccttcagaaaccgaagctcctagctttctgtgctggcatcattagtctgttggcaataactcatggttgcaagatggatgctgtagctccagatatcatatttttattcaaggcactaagaagtgggaaaaagttagcaagacactagctatatttgtcccttatttcaggaaaagcagaagctcccagaagatgtttgcttatgtctcattggagaaaactatgtcacatccctaactgccatccttagctgtcggggagtcaggataggcaagtgtggctttgctatactctgaaatggaagcagcaacaaaaatgagggttgaaaatgaccattgggttagccaataaacaatttctgccacaactaaatgaagggaaatcatagaagactaagttgggcaggcaaaggcagtgtcacctgacagtggagaagaaggaaatcaatattcttgagccctactctgtgccagattttgtgctagcagcatacctgatcaatacatgcatgccacggttatttccattgtgcaattgagaaagctaagctctgagcaacagtctgcatgtagctaaattggaaacctctatttgaattcggatctgcctgtcttaaaagcctattctcagctgggtgtagtggctcatgcccataatcccaacactttgagaacccgaggtgggaggattgcttgagcccaggagttcaagaccagcctgagccacatagtgaaacctcatctcaatcaatcaatcaatacctgtttctttctttctaccaatccatgttgccattgggaaattgaggcgagttttatagcatgaaactggagtacctcactgaatctcagtacctttattgagttgccagcaccttcagtcacctatggacaaagtaggaatctgaagtaattattttatggattaaaaatgcattttgataacaaaaatgataaggggaaaaatggtgaatactcaagtccttagattgtgatgctagttaaaagagaactggcctaggaagcagaagacccagctcagtttaaaaccagctgctaagttgctctttgatcttgggtaagtcatgttccctcatttgtgaagtgaaaggtttggctaggtgatctgcaaagagtctactagccctagaacacttaggttttgctacgttctctcatgtatctttcatttgttcattcattcaataaatatttattaagggcctactgtgtgccaggagcagttctaggtactttggatacatcagacaacagaacaaagatccttgccctgtggctcttaggttcttatgtatgtgtgttagaggtaaagggcacaagcaatcaacacaaaacatggtaaattagtgatgaataaacatgtcgtatgttagaggtggttagttctgtgggggacaaatatggggaaggggcatgagcagtgctggggggaggtcccaggggtcctcgttgagaacacaggggttgagcaggctttggggaggtgagggagtcagctagcacatcactgctgaggtgctgcaggaagaggtaacagcttgagtcaagatccaaaggctgggccttcgagcattttccttcttcctgacctgaggcctggccttgagttcttcttaccccagaaccatcattttctttcacatgtattggttttcaacccagctcaaagctttctggacttgaaagccatttaaattggacccttctgttgcagttagggccatagagcctggctgccaccttcttacttgtgtcttatttcacgctatagaaactctcagttcctagggatttgggtaaaatggtggtagaactaccaaggtctggagatactagagtcttatcaaaatagcacagggaccttaagagccaacccaccatttccagactattattgctgtgtttcctgtttaaagcctcctgaacagcaaatgattcagtgtttctctcatgttccgaaatgattatctttgtctatcaaccataaaaccccaggtacaggccgggcacggtggctcatgcctgtaatcccagcactttgggaggctgaggcaggtggatcacgaggtcaggagatcaagaccatcctgactaacactgtgaaacccgtctctactaaaaacacaaaaaattagccgggcatggtggcaggcacctgtagtcccagctactcgggaggctgaggcaggagaatggcgtgaacccaggaggcggagcttgcagtgagccaagattgcaccactgcactccagcctgggcgacagagcgagactccgtctcaaagaaaaaaaaaaaacaaaaaacccaggtacaatagaactgcgtttttgtctttaccagttattgctcctgagccaacttgtaatagatgggttgagccatccccatcagctccggaaataacctcactaagcgaggccaagagcctctgggagactcagtcacttgctaggccagagaaacacggggtgcagattgcgtttaatgaaaatctttgtgtacatcttgaaacataacaaagagaagggacaagagttgactttgtgagttgtgttgtatgcagagagttccttggagtcttagaatgatggtgttgtgaaggtgcattgctattcccagttgaactgagaactggtaacattgaaagaatcccccttgctcctagtgtgaggttacacatgtgccccagccacctgctctcaggtagactgcactttaggcaagaggctagaccccctagaaaaccccctccacattgtgcagacctctgcccaattactgaagagccctgagtgtcatttcacaggatattgagaaacttagttctggggagtgactcagcatgaaggttatgaattttatgaagctctcttccagttacatctctttttcatgtggccttgacatttgtttgatggcaatagcaaggaaacttacctttgatcactctaatctgagacaattttgaaaaatgtacaaaatgcatgaggtatttaaaatgaaatatctatattaggatgtgggccattgaaccaaatttgatactagattttcttaccaatctgctgtgaaactgaggcagcaagcctcttcttggtgttttctaaccaggttttccccatctcttgatattccccctctcatgcaatatttagagactactgagccacagacagagtatgggaggagaatattgttagagatggagattgtacaggtagaaatggaggcattagcctagaaaattctgttcagagaataaaagtcactctgagcataagaaataatataaaggtatactggcctctattgttacatactagtctactcacaaaataggcaataattgtttatcttttcaacaaatactttgagtacctcctactgtgcccaactctgatctaagcacaagagagacatcagtgaatgccatcatcaaaaagtctccctgtcctcatcttattaggtaaaaccatatgaaattgctgtttttctagttaaaccaattgaatataaataacacctactatctgatccagccattccactctcaggtatttaactaaaagaaataaaagcatacaccctcggatttgtacaccaatgtttgcagcacctgtatctgtaatagcccaaactagaaacagtccaaatgcaaaaacagtgatatgtccatagaatggaatactacacaacaataaaaaggagtgagatactgatatgtactacaacatgggtggacttcagaaacactattctacgtgaaacagatcgaatacataagaccacatatgatgtgatttcacttatacaaaactttggaagttacaaactaattcatagtgacagaaagcagatcattggttgcctagggacaggagagtggggatgggttcaggcaggaaaggaaggaggcaaatgagatctttgggggatgatgggtatgtttactgttttgactgtgatgatgtgttcacaggaggatccctacgtcataccttatcaaatggtgtactttaggtacagtttattatatgacaattatagctcaatgatggtgttataaacagtcaaatagcagcaatttcctatggttcaacccacagataagtttcagtaacgaattaatttaaaattgtttatattcatttttcatacatttattgataagctgccatgtgccagacaccatgagtggtactgtcaatgaaaagtaagactgtttctgctttgaaggttagtggaagaaataggtttgtaaacagaaaactgaatgactttcacaggaagttctgaagcaattaccaggtttaaccaagttgtcctttgttgactgaatttatgtgtgtgtctgccccttctttttcagagtgacttgtggtctttgggtatcaccgccattgaaatggcagaaggtgctccccgtaagtaccctcctctggggtgaaatctgttgctggtctgctctgcaggtactgaagtttccttgccaggagctgcagttgctttacttccactacaccgagccctgcatggattcaagctggcatatttagaaagcagagtcatcttaaatcaaccaggaatccattcatttcagagcagtgggagaatcctgtttttattagaaaaaaaaaaaaggaagaaaaagaaagcatactttggggagtcttgtttgttttacagattctgtacatcatttattcttggactactcctcacctgacataaaactgtgaccaactcacaagactataaactccaatgtatgaaaatccaaaattaattttcagtgcacaggttatacaaagactccactcaatggctatcactcctcttaaaatactgatgtttaaaattttagatttccctgctatttgagacagagtggctagggctccagcagtcttgagaatctcagttccttgagatttggagtattggccccagcagagagtctctgtcatgagactgtgcctcacagacttccatataggaagtgtaactgattgtcagccccagctgctgcaatggcagcaggccgcacctttcaagggccactccccgccagtgacctagcacagtggggatactaaggcaggccctttcctggaggacacaagattcctttgtaggcaactttcacccaagtaatcccctatgactttacaagacctgcaggacaggctgggacccttccacctaccttttctccctctctccttcactcagggtcagacttgcatagcaatctgatgacttcccatactgcctggctccttccctgtttccattcacatagtaatttacccagtaatatccttggtgtctgcatctcaaaggactaggacaaaaataggccctttatttgcacgacaggtcattatacttatgacttttaccttcgggttgtcatcgttttcttacttcccagtctagaattggtagaactcatctgtagcatgattgatttggagtgctggttgacaaaattgccctcattcacaatgctaataggcatgtgtgaatcagaaaaataatatattgcagtcttaaaccatattatcattcttgatgagtggtagacagggctaaaaataaacttctgcccacagaatcctttggcttttagggagcatatattcttattctagctacaaagtagaaattctcccagatgtttgaaaagtaaactaataaaatattttattaaaataagaacatatgagtgctttcactataaacgataatgtcatgtttacaagatgagatctttttataactttgtttttctgccagactctgtgtgacttaatcctctgggcttcctggggccagtgaatttaaaaacaaaatgaaacaaaacccgttacgaaacctgaaaagccattcgggatatctggaaacagagaaaatggggctctggggctggtgttttggactccaaaaatctgtgtagataacaattgcatttggatgagctgtcgacgtgtaagaaatagacgggataatgaaatgccttttatttatggcttaggcttttactaattaaaaatagcttaccatctccattgtagttgtcatctgatggtatttactttaaatgtcaggtggtcattcacagcaaggatggctggttgttgaccctttaacttagtttccttaaatatgaagtaaacatgtattcactagaaatgttagcagtagctatgtgaaccatgttgtattttatgagactcctgtaagtggatattggatctttcaaatgctcagaagcatttggatattctgactttgtgctcactggtggtgtgtaaactgagtgggtcattgggcagccattatctgcacagccaagacgggcttggcctgggtttggcctcctaactgtagctggcccttgttttggtctcttgcagctctctgtgacatgcaccccatgagagctctcttcctcatcccccggaacccagcgcctcggctgaagtctaagaagtggtgagtttggtcttcgatgtttcgcagatctaagggtgaggttttcttgtgattctattttggattagctctaatccctaggtcctgctgatagaatgagactaacatgtatgatgacttggtgaattactttccatatgctgtcattcatcttaaagtatatattgagtatctactgtttgtacagcaggtctttattcccccacctttaaggtaagaaattattagccaaaatgggtaagtgaagccaagtaataacatgaaagctctttgatctataactccaagtcatatctttcctggcagcacagaacagcttatcagagagggtgatagtttagagagtcagcctgttagattggctgatttctcttctattccttacaacaatcattccctaagtgcatatacataccaggtaatgtttgagattatttctctggctcgtgtatgagcatttgcagtttttttgtttttactactgttttcacatatggcaggtgatactggcttcttatttggggcagcgatttaacttttccttttgataaacttacataaaacagtggcttaatttaaaggaaactactacatgaatactagtatgagtggtgtgagggtacggcaaaaattatgttgataggatatgactgactgacatttgggaaacagttctacaggttaagccagatgttggatgtttgactttttggggataattatatagttgggatcttcctatcttattattccataaccaaaattcattgcttcctcctttcttcctatggaaatggtgtatcctccctgatacattcttgaatctcggattactcatggtctgaggtcaattcctgcactatttgtgacctcctatcctttttctagagataagtcctgggcagtgagaccatgagggacaggatccttctgcccctttccatagcccttcatgatcaggcgcttgactggggtcctcatgtttcccacccacccacacacaggctcacctctaccatacagggggcagccttaattaccaccagtcatctactaatgagagccaccctggtggaacagaggaaagggcacactgcacagaaagagggaaggaaacagccagaaaagagatggcagcctcagaattgccgggccctgcgaggggagtgagagttgctattggtaacaaggaggcagagcgttccctgctcctccttcctctgcagagggtcattgtggtgcaagacaacccttctctccccagcaacagccctcccattgggtgtcatacatcatgtgatcggcaaagcaccccaacaccctgcttcctctcttctccctggatcagactcccggggagagggactggcgcagttctcttccctggaagtgacagtgacactacaaagccctctgctaggttcctgcttgatatctgagctgagtctggtgtatacagtgggctttacttaccctgttccctgccctatcttctccttgtctccctttactgctgcaggacacgtattctgagcttttccacagaggaggacaaactggccctccacaaatgtatttggctgtcacactatggtcatataccctgttttaaaaatatgtgtattaattggcaacacttaaaaatctgtcaattgagcattacatttagatttctggcctttttcttgcaaagatgcagtgaactgcctgcaaagatgctagctgctgctcccatttaggacaagtgattgtccttctcctccagctgccacctccccccaactcagaagctggtgtcagttggttagtatacatctcctgttttcttttcttttcttttctttttttttttttttgagacggagtctcgctctgtcgcccaggctggagtgcagtggcacgatctcggctcactgcaagctctgcctcccgggttcacgccattctcctgcctcagtctcctgagtagctaggactacaggcgcccgccaccatgccctgctaattttttgtatttttttttttttttttagtagagacagggtttcaccgtgttggccaggatggtcttgatctcctgacctcatgatccgcccgcctcggcctcccaaagtgctgggattacaggcgtgagccaccgcgcctggccacatctcctgttttcatcttaaccatggtctacaccacccctttttgtgacctacctgaccccacagaaaagtgagtgaacagcccttgccctacagtgtcagttttcaccgactgagacccaaaaaagatcaacggtgtgctgaccttgtttgagaaatacaaacttttaggacaatgcagtctgatttttcggcttcaaacctttgacaacaactaattttaataatgctggagggagcaggagaagtttggaaacactgagaagtccaggccaatttcatctcatcctgccaccttgcacacctttccctgatgtgtaaggaaaactgagtaggaaagctatgggaacaagtcccatattgtcagacagggaaaggaaaagtaacctgattgctagagagagaccggggaaacaaaagccctgataatgtgccatttcacacttcgatcccagcctttgtagaggtggtggtgcagcctccaggcacatgatacttgacagcagacatggctcccatttctctgcaatacaattccaccagtttttaagtgaaaatatttaaacacttcagagtattttatcttgaaagcgcaggtccaaagtgatttgaagtaagttagggtttactttaatagactctagtgtttgagaggaaatgaaacattttgtttatgttttttattttaattatttaagaggaaaagactccctcccccgaccaagagacaaaattccaaaacattcttttatttccagctattctctacctaaatgagttaccgggttaaatgccttgttctcagtgtatatatcaacacctgaccaaagggggcgccattgttgagacagggccatgaactcttctcatggcaaacattcaataaagcatcattttcaacatgactgagtctacaacatacaaggcataaactggtctcttagtgtgaactttttttttgttttttaacttgtaccttcaagatttgagaaataaaggcagtggcactgctctttccactgtcatcgtggagggaaaggagaccaccaccactcacaggagcccagttcttccttccctattggtatgatgaggagaggcctttgtggtatgggatgatgaagttagggcaccactgaatgttcaggcagctcagccatttaataataagttgtctgggagggttgtaacctttgtggaatcagaggaaaccaaagatactctcaccctctacctccatatcagcaccagcaagtgaaaagcaagactgggatacccattctctcttcctgtctcttgtgcgtgcgtagattccactcgcaggggtaaaccatctccttcaaaagattttctcctaccttctcttgccaccctgctcatccacactcacctgccctcgcaagtatactcagtgtcactgcttccctccaggactttctggagaaggataggaatggctccattaagtataagacagtgaatctttcatgtgccctttaaatttgaagagcccacacaggcaaagcagcactcagttgaggtcattagaaaaatcataactgcttatatgtacaagctccactggtccaagccactcatgcttcagatgcaggtgtgcaggcccagtgaggctaagtggtgtatttgcacgagttctagcctccttactgggagaaccagcctggacccagcctcctgcttttgctccaaggctaaaaatcacccccgttattttatgaggcaccagttctgattcttggtgggttgtcagacttttgagataggacaaagttcgtgtgtgtgtatcagaaattccttctactagactgaatattctagtagtaatgtgactttgaactttggactttattaaaatccagctaaaaactattacacagactttaaaaattaacctgtttgtgcaggcttcttggagataacagcccagttgactcctcctgctaagctatttaacccatacgtgaaataattcccttaaagaactctatgtttacttagttcaacagaaatgaggatttctttttttttagagacagagtctcattctgtcacccaggctagtgtacagtggtgcaatcatagctcactgcagcctcaaactcctgggctcaaatgatcctcccacctcagcctccccagtggctagaactacaggtgcatgccaccatgctcagctacttttttctattgtttataaagagaccgtcttgctatattgcccaggctggtctcgaactcctggcctcaagcaatccatccatctcagcctcccaaagcactgggattataggtgtgaactaccgcacctggccagaagtggggatttctgctcctaagtcctaaaggcggatgctgtgttccttaagtccaatgatgctcagagattgctgggggcaatgtcatcatagtcatcatcatcataatagcaaacacatatgtggcatttatgataccaggcactgttctcaatattttacatgaattaattcacttatcataactttttttgagataagtactaataatatccccattgaatgcagccagggaaactgagacacatagaagttaagtaatttgtccaagttagtaagtgatgcaactcaaagtaaaggaagagggtagcttttggaaatagggcagggccaatgcaaattttaggccaaattgcgtttagggagtctgatgattaccaaaaacttttaacccaactgattataatagctaatgtaacaatctttccagcattttgaattcccccaacacaatttaacatataaacaggttcaatctgggaagataaagtatttagtgactctgatagtagaactagtattatcagactgtaggtaccaatcattaccatttatttctccatgccaacccttgggaaatcagttttactaaccttaggtgtttttattttataagagacagaactacattactatcagcagagattcaagcaataaagttatataaatgtactttaaactcattagaacactcagcaaacagtgaggtaatattcaacataggtgaagtgttttcactcttaaataagtgtgtaattaagcatattgattctttggtcatgctaacttaagacactacgaatccttctttgaagactcattttaagtaaacattattttctcttcaaagggtgccacttgaagaagatatgaaatatattaccagctttgtagttctgcacaagtgggcccatcttttaggcccaaagttattctcttgaatatctctgagttttttctcccagcaaggcatactgggaaaaagtactctgtttaataactaatttcattaaacttgaacactattccattctggagatctggagatttctctgactgttattttagatgccaatatcagggaatagactgtacagtctattaaatctggatcttacttttaaattgaatgtgatttcttttatttatcaacctctaattaatagttggttgagtactttataaaaaaaagcacttctggcaggtgcggtggcccatgcctgtaataccagcactttgggaggctgaggtaggcgaatcatctgaggtcaggagtttgagaccagcctggtcaacatggcaaaaccctgtctctactaaaaatacaaaaattatccaggtgtggtgtcatacacctgtagtcccagctactcaggaggctgaggcaggagaatcacttgaacgtgagaggcagaggttgcagtgagctgagatcatgccattgcactccagcctgggtgacagagcaagactccatctaaaaaaaaaaaaataatgataataaaataagcacttccttctagttgccagcaagaaaaagagaactgccatttatattccttataaatatttcatacctttctgtcttaatttttgttttcatctttttaatactgatttttctacctggaaaagtactgtatggagtttgtttatatcttcatgcaggtcagcctcattctcttcaattcattccttaggagtgtcctttatttcattacatttttctggcaaggtttcttcttagatgagatcatatttatgcctccacagatttatttgattgatctgagaaagagaagaatatccgctctccaaacctccctttctgtccctcaaaagtgcagacttgaaggtggccatattgcagctcttgtccagaaccttcatcacgcattcactcatgcaccaaacacacagctcaggtagtgtgctcatgatgcaaagatggctcaggcacgttgatgctgctgatgattttcagtgggaagaagcaaggatatgcatggaagcacttaacaaggaggtgcacagagtgtcctgctgtcactatttctagtccacagtgtggccaacgctgattcatcctggggcaaccccaagcacagtaggctacctttatttctaggtaaaatattttaaaagcttgaatgtagcttagaaatttagagcggaaaaaaaaaataccagtgattcagtactttaaaaacatggaataaagtgaaaaactgctttgaccagggcagcactagagagtggtgcatacaaaagtgccctgtcatgtttgagtgttgaagaacatgctctccattgtgttctgtgtggtgagggcacctctcaggcctggagagtatgtatgcagggactgccgggcaaaggctcagtcctgggatccactcctgtatctcccctgtgcaccacaggagagcaacagagagcacaaaacagatcattcctgctctgggcaggacaggaagggtgacccgagtttcatcaaggtctcctggagtgccttggaaaagcatgctatagagtcataagcttaattattgatgactctgaacaatttcttggaactttcagcaagaacatgcgtgcttaactcatgaatcacggctgaagtccaccattaatttctgccacattgtggccttactgccataatcgtaggtatggtatctctcgccagctctcccctgccaggtctctggcgtggggtttatctttgaggaaatattgcctttctagaggaagataaatttgcatctgggtgtgaacttaattctttaaagttaaatgtctaagtccttgagttaacgacaaaggtacacatatacttatatgttcttattccttggaaagcagcgttcaaaagtgattctgaaactactggttacaaagtttgcctaatcaaagttcacttcatcatataaaaatcttgctcatttctacgaaatgcactccctgttacctatccaaccttggttttactttcctccagcttgcatcttctgccttatttaagtggctcacctcagtgtcccccaacatacattattctcatcctagcctgagtttttcactgtcatcctacatatctgaactatcctttccccagagtgattttctcctaatttttaaaggcccagctatggtttccttattccaatagcccttctagatgtgattcccataggggtctttttcttccctgcgtccttttggtctgctatgtaatgttacatataaattgtgcaaaaatgctttcatgtgcataactaccttctgctacctcaattgcacgttgatgatgatgatgcctttgaacccattatgcctaatatagtgctacaactgttttctgattagtggatgatccctatgccagccaattggaccttaaaaaaagaaaaagtcccagcatttcagaaattacacatttgcttttctttggatcgccgttttatctgtggattcatttcttttgtttggcaggtcaaaaaaattccagtcatttattgagagctgcttggtaaagaatcacagccagcgaccagcaacagaacaattgatgaagcatccatttatacgagaccaacctaatgagcgacaggtccgcattcaactcaaggaccatattgatagaacaaagaagaagcgaggagaaaaaggttagacgcacatttgtatttcagcagcagaaacaaaagatggagtgaatcatgggcgcttgatgtatttggaggtgactatggggatttcaaatgggcctgcattattctttagtgcgaggggctgtctctgagaccacagcctctgggcatcagtggcgtgagactattgaagtagaatctttcatgaaaaaaatagaactgcaagaaacattacctctgccaggcactgaacaaagtcatgttgaatgatactatgaagtactttaatatgacaagtgattttcttaattcaaattaatattcatgtttagaagactaaaactctacagaagacagataacctaaagaaaaaaattcatctagttgacatttttctgtactgacattcttcaacatttaaatttatgtgctctgaggctcatttctaattctgttatttagaagtcagaaataatttttttatagttgcagtgatagaaaagatcattaggttgccaggcttgctgaatggaacatcagatttttgagctgaaggtcatttaacacacttctttattttatatatgcaaaagcacatctttgtgactctagctcttatatgtcactgtctcttcactgcatcattgaaagaacatgagtccaaacttggagtctcaggctgcaccctacctttttgaatggaagcttacatttttaactagcatagaaatggtatgctaatactgtatattagggaacattgaggtgagctgccaaatgagacaaaatgcaagccaaagaaaagtgaaactaaggttggatgggtaaggggagtgcattttgtagaaatgagcaagattcttatatggtgaagagaattttcattaggcaaattttgaaaccagtaatttcagaatcacttttgaactttgcattccaattaacaactcatgagtcatagctaaggttcaccactaatttctactacattgtgtgcttgctgccataatcatcggtatggtatctctcaccagcactcccctaccctgtgcctctctggcataggatttatctttgaggaaacagtacctttctaaaggaagacaaatttgttcttggagattgactagcatattgactgcgccatgaccaaggtaaaaacttgcatggtctggagcaggtttaatggctagctgaggtagggcaagttagagtatgggaagagagaaatggagaggacagcagtgagggctttctgggtagacagcaggagggggttgctgctgggaggatagcagtgaaaggcagtgtgaggctggaaagctgagcattaacagtgtggtgagtggacagtagagaggaagaccagagactgaggatgggaggggaggcacatggtgatgtgcttgttcttgcttccttcctctccatttctctcctctcttcagttcagaggcagtagcggagggtagcccacagacaggacagaggctgcctttctgttatttgcatttcctttcttctttgcctctgcagttaatacccataacacaagctggggactagcggtgggggcggtgagcagtatgaaagttgagactggattggagaggtaagatcagcagagggctaaggcaggatgagagaatctcagtgaaggttccagaaagagttcctttttttttttttttttttttgagatgagttctaactttgttgctcaggctggtctcaaactcctgggctcaagggatcctccacctcagcctctcaaagtgctgggattataggcatgagccacccacccagcactttttttattttttattttttgagacaggctctgtctctgttgctcaggctggagtgctcactgcaacctctatctcccgggctcaagtgatcctcccatcttagcctcccaagtagctgggactacaggtgcacaccaccatgcctggctgattttatatttttttagatttttagtagagacgaggtctcactatgttgcccaggctggtcttgaactgctgaactcaagaaatcctcctgcctcagcctcccaaagtgctggtattataggcatgggccaccaaacccagccccagggaagaattcttatgcagctagcagggacttgaaggaatgtatgatcagcttagactatcatacattgttgtgaagctaggccaaaacggtggctcatctgcagttaataagatgtcaattagaccctaaggagctgggaggccagcccaagctggaggaactaggcatgaagagaaatacataggtcaaactcaaaagttccaggactgatttttcaattgctccttgtccatggtggtcttgggctactccatgaagtcagaatttttaagggcatattttagggcagtgtgtcagacatgcaaccattaaatgctaacttctctcaaaaggacattttattatacggtgaatatatagcatagtttaagtgctcagactgttttcagattcatattctgggttcaaattctaactctgccccttatcagttatgtgaacatcactccagttttctcatctttaaaataagattgagagtatactactaatatctactgcctcaaatagttgcaaagattaaacgaggtaatgcatttaaaatgcttgacataatgtccaggacatagatgcactcagtaaatatcagttattcttatgtaggcaattacttattgacccatactttttcatcacttactcagagtactttgtgagaactcatgacccatctccctctggggcataaataagagtgattgaagcctgtgcctcaggttgtttccacattttgtggggcacaaactctggaatgtgactcagaactcaccatgccatgaagatagatcatttttaatgtgtttgttctctgcagagtggaaaagtaagattcttgggaataggtatgttcaagagttatgtagtaatttaaggaatctaagcctgtttaggcttagggccaccagaatcacagttctagtctcctttttgtctgctccccaaggaatggtgtttgatcaaatgagatctaattccatttgttcagtttaatcaaatgacttagtttgctctaatattacttttcactttcttagttgttctatgaccaacttttggtagaatcaatcaaagcaattctattttgcattatttgtgatttttttcaacctgatattttttccctaacatatgctgacacatgccaaatttaacccagtaatataaaagcagtcaaaagcaaattttggtgaagtattaaatattaaattgagaagcctgacaaatgaaggatttaccctagagagtagaagtaattggaataattgtgtgcttcttttccttgctgtaatttcctttattagataaaatttctgcatttttactttgaaatctgtttattcattttgaaaaagtttggaatatttcatttttagggtggagtattaaaatgctttatgcaggttctttatattttggtgaactaatattttaaaaataagtagcctgaaagcttcatacatacctaaatgtatgaagctaagttgtgattttaaaaatacacttgaactcatcaaacttttggctttccttcattatctctttaatggctagtgtgaaaagcaaggcatgtttatcaaatctgagcattctcactgtgtgactgctgcctcctggtggtaacataactaaattgcagtttcagtttctttttagggatgtgcaaatgtcttcaaggttgtaattattaacctacagctatgaagagataggagtaatgtgacaccttcctttgcttaaaagctcctccaagggttcctcattgccaataggaaagttctcagcatggcatttataagaatcagtgagccatttcatccctgccagcctttgtccctccataaggttttctcacacccaggcacctaactactcacagctcattgtttcctgaacatattatgcactgtaatactgccagccttactcatgtggatatgttgcttagagtgtccttttcccacaagtgccagctgctaactgcctggagaagggccactgaccttccaaagcccagttcattttttctccaaagacttcaagtctcttcctccattatgaccagtggcactagctgttcctttctttgatatctcattgctctttatatgtactgctatttagcatataatatgttggaaagagcactattttttaagttggaaaagttctggattgaattctaaatccaaatcctagattgaccttttattaatgagataacattggttatattacttaacctcttgtaatttcagtattcttgcttgaaaaatagacactaatttggagggttattatgaaaaataaatgagagaacagagtaaaatatctagcagtagtgactggtgtgggagatacccactaaatattccttccctttcttcacaatcatgaaggctctgatatttactcatctcacatattagatttgatctcttccaaagcaagcctcaatcttattcattcacacatgtaaactgcttcccattttgctgaattaaaggactgtccctagtggatcaatcaaaacacattttaaatatagatatacattttttaaattttaaatatatatttgagacggagtctcactctatcacccaggcttgagtgcagtggtgcgatcttggctcactgcaagctccaccttccaggttcatgccattctcctgcctcagcctcccaagtagctgggactaccggtgcctgtaaccacgcccagctaatttttttttgtatttttagtagagatggggtttcactgtgttagcctagatggtctcgatcttctgacctcatgatccgcccaccttggcctcccaaagtgctgggattacaggcgtgaaccaccgcacccggccactatatatttttaatagcacctattgtcaaaagtttctttgttgcacttagcaaaatagtctaaagacagtttgcaagtccatgtaagtcataataaaatcctactttaaaaatggttaataccatcaataagttacaaagggccaatgggtttgatatgggtggctttatagtgggaataacacaaacaaattattattattattatattattattttgagacagggcctcgctctgtcgcccatgctagagtgcagtggcacgatcttggctcactacaagctccccctcctgggtttgcgccattctcctgcctcagcctcccaagtagctgggactacaggcacccgccaccacgcccggctaattttttttgtatttttagtagagacggggttttgccatgttagccaggatggtctcgatctcctgaccttgtgatccgcccgcctcagcctcccaaagtgctgggattacaggcgtgagccaccgtgcccggccaaacaagttatttttaattgaaattaaattaataaaaaaattaaaaaattattttttaattccttctcatgtgaacactaggcactggggacagatatctagagtcagccgagacagccttgaatgtggttaatttcatatacttatgggaaccattaaatcacaagcctggagaccgttccagcgctgtgttaactacaactctttgggtgtctatttatttatatataagagacggggttgggctttactgagccatagcatctttttgtgcactaacatgctgggatctttcttcagatgagacagagtatgagtacagtggaagtgaggaagaagaggaggagaatgactcaggagagcccaggtatgagagcaaaagccaagtcttctaatgttcacattctgaattgtgcttgtgtgaaattcactttccttttgatttataggttcgtttttaagaatccaccagggtggtcttatttaatttattgcccatgaacatactcattaatttgggaaaatttccctaggcagaccattacgaaaatgtggaaatcagcatattctttatcttgtcccccaagatttatggtctctatcgtaagagcttgttttcttacatatgtaacacgtagaatgggtagaaggctaattatctgggcaatgcaggactaaaaatacttaaaactgcaactttctagagacctaagtggtattttcggacttgcgttattcagttcgttacttcacacctttgagaagcccattcgggtagccactgtccttgtcacatgccttggtattttcattgcagcctaatccaggagaaagtgattttcagaaaatcaaattatatgtagagatgaactccaaacaaatacttttgggccattcctgttgtcacctgttggacctcagaatccagggctgttttattgtcatgcctacattttgaattccacttgactttgattctgactttcttctagtctgtgtttataagtaattaaggttagtgtgcttgcactgccaggatatctctttggtgagcgaattcagcttgttgagtcaaggagggcaggcccacatcccatggtgccatgcagtatacatgtgaagtaagacttggggggaattgcacaagcagaagactcattgaggtgtggcctccctcctcaagccatccaaggagtggaccctaatgctccagaaggatcagttcctgtaccactgagggagagctttctgaccagaaaaggggccagcttagccaccactgctagaatgagccagataccatgtgttctttttttatgctaactcagacctactgagctggattcttgctaagcttctataagaagatggaactgagctttcagagccatccagtttttctctcttcacctgccacaggattcctcaaggtcaaagaccgaatacttctttcctaccatctgatacatagcatgttggccgtccccggtttagctgcataaagaagatgactgccaagtagtgacatagaaaatgaacattcctgaaaggcagaggaccaaacgccctgctttcagagaagttgtacaccagtgttcaaaagcttacccaaaaggttactgtgtcagccttctgaccactttctgtagaactgagaaaccctgtctttctaacacttgctaaactgcatattaggagtcactcaacgagccagcccagccgtaccttaacacttccgtaattataacatgtcattatatcatgctgaagattatgttccaagtcctgttgttgttgttattatactttaagtccaagtcctgtttttatggacgtatctaattaatcttcatgaaatcctgaaaaatagaaaaggacaatggttatctcattttagaaatgaggcgacagcctaagggttgcacccaggtcacacacagagttaatggttgagtcactaacacagctcagatcttctgacattgattcaatatcaattaatattaatggagcatcctcgtgtgcatgggaggctgggttcccaagtccctcccctctgcacagggcaagtggcctgtgtagataagcaccatcgtttggggttttagagtttgacacaaaggctctaagttttagagaaggcttgtgagtagacgccaagcattgtctatggaacatcacgaacaaagcctttttatgtcttttcatggcagtatctcacacagcacactaactactctccaaaaccgatccttggtcctcttgttaactgccacgaaacttgctcctccctcagcattcctcattcctgttctcgttaccaccgtcacccagccaccaagacagaacctgcaagtcatccctcactccacatgtcagatctgtccacaggcttcgtgacctctatccccaaacgctccttccctcctccacccgctctgctctcgccctgggtggtgtccccaccccagaaccactctgcagcagcagtccggcttgctgtgcttgcccctgtacccctcgctaggtcatccatttagcagccaaacccatctgctcatgttgctcttctgcataaaaccttcccgtgcctgcatggctgtcgcggccccgcacctatctctctgacctcctctcatacccttctccctctcattcactctgctctgggaagccgggctggtgttcagttgctcaaaaatagggtgcacccctgttttcctctcaggcctctaaacctgcttttccctctgcctggaacgttcttccttcttcatcaactgcttccttcccagagaggtctttctgaccacccatctaaagtaaggcctcaaagcttacctcagctcccagccactgtcactgaaacaattacaattttagtcttctatagagcctattaatacctgaaattatttgtctgtatgtgtgtcccataagaagataactttaaagggagaatttatctagcaactgccgtatccttagagcttactacagtgactgccacatagcaggtgctccgtaaatatgtgtttaatagatttatttcaaatggaagcttccagaaagattaaaagggctacgtttgaataaacagaagtcatttcttagctccctcttaggctgctgtgcagaatcaaggagtctgtaacatttagttgttcacctgcgagcagggcagcccaggaccaccagcgaagtaggtagaacttatttatgtcctctcgatctctgtcgtatgcacacacattcatgtacaaccaccattttacagaagacaaaactgttacctaaacagaatctaggaaccaatgagctgggttgaagtcctagctgcacctgctgtggccagagccaaaccaagccctttaagtgtggtacagtcaggcaaaccctgacttggactcagcaggcttgggctcagatcctggctctgtgttgaccttgactcaagggttttccatcgctagttcatcgtggcttcacaggagcagcctggcctctgcctcatggggtttggtgtgagggggtggtgtgggtgaggccgatctgtgcttgtctgagtacccttgttgcccaccattgtccatttttattgaaaataatccagtctggggctcatggcttgcacactggctaaagtctttaaaaacaaatctttgccacgtcccaaggatgagggagtggtgtggacagtcctggagaaggtgacaactctgagaatgtgacatccctctatggatggaggcagcatttgttggccacagtcgtactgaaagggaggcaggtctcttatcctgatgctgtttctttggggtgaatgattgaattagcggaggatctaggagcctgtgctcttctttccctgtgtgtgggtgaatcatttgtcccgctttcctcctccaaggcctcttggtagccatggcccctgccccacgtgggatcctgatcactctctcctacccacagctccatcctgaatctgccaggggagtcgacgctgcggagggactttctgaggctgcagctggccaacaaggagcgttctgaggccctacggaggcagcagctggagcagcagcagcgggagaatgaggagcacaagcggcagctgctggccgagcgtcagaagcgcatcgaggagcagaaagagcagaggcggcggctggaggaggtgaggacctgctcgggccacctctgaccccaagcctctcagttgtggtcactctccaagcattccctgggggcccacatcccacctgtgagcacacagagcttagaggcacaaaggggttgactgcaagggcagataagtcctgaatgctcttacaaacaaaaggcttcccttgctttttgtggtggtgtggtcatttcagaaaagcaggtgaaggccgtcaccccttcctgtcttgcccatatatcaccttctcagcaccttctcagctttacttaaagtcacagtccctccctccagcatgtcctatttccctgccctgccttattacttttacacagcccttagcaccttcaaatatagtctacatatacttttacatgcctgaatgtccctactggaatttaagctccatcaggacaaggagattttatctcttttattccctgatgtatctctagcatgtcgtaggtgcctcataaatatctgtggaatgagtaatatatgaatgaatgggtcagtagttgagaggtgaaatataggtattaactagatcacagtgaataagcagataagtggaatttcaagtatggaagagtaggacctgcctattgatgctctgaatgctaggaagaatgtttcacagatcctttcccagacatcccttagtacccagggcctgtcctccagcctgtgggcaagacctgcctttagcagcagatactgcttatctgtgtgggaagccatactgctagccacagttggctgcatgccttgtcctgggccagactctcaccttgtggtcttacagacatttgttaaagcctccttcccagaactttgcccagatatctcaggcctccttcctctgccagataaatcaaagcctctagacaattaggaaaccgagagagcatatctattggggaagttgggcagcagatgaaaggcgcactaactgcacggtaatgggatagtaattttacaggtttcccgaacaccagcttgcttctcattaacgggcttgcagcaattcacttgctttgccaggtggccactgaagatttagagggtggtgaattgcagtcaccagcagcagattgctttttaaatggtacatcaaggtccagcctccctggtttaaatcagtaagggcctcagttccagtttgcagcaaatcccatcaacctcattatgtccttcaaatatcagtatcagaccagcaacaataatacccaatggttacaattattgagtgattttagtaatgtcaagtaccaggcaggatgctttgcttatagccactatctcatctactatcattatctcttttcctgtattgattatctctcatgcaaaactcataatccccatttaacaaagaagaaactgaggttcagggagggaagtaattggtcccatgttgcagggtactgtgtttagtactttacacgaattgtctcatttaatcctcacaataatctccagtctaaagataatgcagctgagtcttagagaggttaataacttgttaaaggttgagaagaaaaccgggtttcagatccaggggattggcctgcagagcctaagcaccaagtcactgcatgtgttctgtgtctccactgataagtcaaagttggtatgcttttccacatccctcatctggcctctatgtctatagtcttttatcctgaacatttaaggagttctgcgcaagggcacagaatctgtggccaacagatgctcgcctttgacctgggttctgtctcacgctcccagtcagagctattgccaaggcctcctttgtgtctcttctcttgtggcatttgcttgaacctctaccatggagcaagtcagagttcagctcactgaggcatgtgcagccagagacacaccctgtcaatcctggcttgcacagaagacgtcagccagcatgcatgagggcacaagccttttgctgtatgtaccaatgggcatgagccttggctccataccagaagcaggaatgcttctggccacagagcattgatagattattccagctttctcttttgatccttcatcttattctatagcgcagtggagaagaacaaggaatactaagtactcagagagctgtaaattctgaaccccttagtcatgacattctctcccaccaggaactcttctgctgtgtcctgctcctgccaggtccccttctatgtctgcttccctggcctttggtgaccacttgtgtttctggtgtcctgagtaggaacttggactacattgtcatatagaaactgttaaagcccatagttcagcttgagtatttcactgcgagtcatttttccttttgtaggaaaaacattcccacttagctacccctttggtcacacaggactatgtagcttgtagcttttgtattttgtgatctcaaatgtcacctcccaccagagggtttctaaggaagccctgcatgtcctttactatttatgagtaaccatgtggatttggctaagctctaaatcagtgtctgtatattcttagaaggactttgaatatacactgaatgttgtcactgatcagctttatgaaaaggacgtggcttcaggccaattaaatggtggagagaagactcagcttttgaccattgttgaagtacaacctataacaaagttccaggaacttgattaaacccagctaaagtgaatgagtccatcaatggtgagaaaaagtacaaggaggacctcttctagttttactcagctcaataaaaatttctattacttggcataaacaaaatacatcttgttttattctgtatcatggagttaggatccaagaataatgggagccttcaggggtcaaggcttctactctggtaatcttgagcaagtttgtggtgatgtttgattctgctcaagagttctgaaatgatattagtgatttatatatgtgtttcaaattgctgagcacattctatactttcattttggggagcgtgcctgtaagtcacaggaatgaatcaaatagaccccagaagcacctgctccctggtagtatgttttattctttcaagactctttcaggacaccaacattctcatgtagtgcccttcaagaccatcctaacattgtccagttataaaaataaccagttctatctggccaaaaaatatacactttggctccatcccatgaatttttttttttttttttgaagagatatcacctgtatcttattggccagtaatcatggagcattaatgtacaaagtaagaacctggcagcctaaaaatgtcagccctctctaagcctctaactttttattgtgactgaggctttcaaggatgttagactcaattgttgttgttgtttttaagcatgaggtttttaagcataaggttgaattaaaaccttttcctggggtctgtaggtcatcatttgacaaatattcagtgaacacctctgttgtgtgggcaccatgttagacactagaaatacagtctcccattgtgacgattagatctgtgagggaaacaggcactaagcaaataatcagccaagtaatcatttatcatcacagcaatgactgccgtggtggaggagagtggcatgctaaaagagcgtgccacagggtgggagcctcacctggcttggtcagagtcccgctacaggagggagtggggcacggagagataccaggcagggaagccatggcacagtcatgcagggctttgtagaccatgttgattacttttgaattttattctaagaagagtgggaaaccattgatgtgtcttcactaagggaacagaatcagatctgcctttttcaaatgaaacttgggctgctgcagttggtgctggaaagaagcaagagtaaatggaggagacaagttagtctaggccagagagtgtgatgctttggacagatgatggtggagtggggattgagaaaagtggacacatttgagacaaatgtagcctgtggaccatgcaggatgtgcaagttgattagacatcagggatgaggaagagcagccaacagtaatagtagtagtacaatccatgcagttggattatggtagagatggccatagaagaggggtcaaaaataagaaaaataggaattattggtttgtggtaataaaagtacacatgagaagagagtgtaggcctgagctctaagaactcagaatagacaaggaagagacagcagagaaatttgataaggaagtggaaggaacacctggagagtttgatgctatagaagcaaagatttagtatgcaagcataaggatggagttaaaggggccagctctgcagaatgctgctcagaggtcaggaagacaatagcatcttttggtttcaaatgacaaagaggatatttaaaacatagttttggccgggcgcagtggctcacgcccactgtaatcccagcattttgggaggccgaggcaggtggatcacgagatcaggagatcaagaccatcctggataacacggtgaaaccccgtctctactaaaaatacaaaaaaatagccgggtgtggtggcaggcgcctgtagtcccagctactcgggaagctgaggcaggagaatggcatgaacccgggaggcggagtttgcagtgagccaagatcatgccactgcactccagcctgggcaacagagcaagactccgtctcaaaaaaaaaaaaacaaaaaacaaaaaacaaaacacatagtttttgtgtagtactccctagaaattctttcatttcctgtcttttctgggaagggaagcaacctgcccagggagtcagtagatctgcacttggagtgaaaagacgtcaacttctgagggtcaccatgtactactactacctgcatgccctggcagttcttattctctccacacctccacttcctgagctctgcagggagatcagtagcaaagcttgttcccaccaccaaagttttcctgaggattaaccagaaaaatggatataaaagaactttattgactgccaaaagctggacagaccttacttttgaggactggtcaaattcagcttaaatatttctaatgagacccaccttatgcttgtgttggaattcttcctaattccatgctcatccatttgctatcagctttttgttcacattctctgttaccatgcattcttccttttttctttttttttaattaatttattttttgagatggagtctactctgtcacccaggttggaggcacgatcatctcagctcactgcaacctctgcctcccagattcaagcaatccttatgcctcagccatccgagtagctgggattacaggcatgctccaccacgcccagctagtctttgtgtttttagtagagatagggttttgtcatattagccaggctggtctcaaactcctggcctcaagtgatctgcctgcctcggtctcccagagtgctgggattacaggtgtgaaccaccatgcccggtcaccattcactcttctcttagggtaaccaagcccagtctcaaagcagctcagctgtgcaagctgaagcccaaacccagagaagccgctggtgtggaaggttgttctttggaaccttagtagcttcttccaaatgctcctagacagcctccacccacaaaagagtggtgaggtggtggggaagctgcaagtttctctaagaatcacagtgcaggacagcatattgatgctctggaaagtcctgggacagcagagcatttggtaaaattcagtagagagtgaaattgtattttggttaacagcatagactctagagcctaagactgccaggggtcaaatcccagctttcttccttattaggtgtgtgacctgagtaagttctttaactttcctgttttacagtttcctcatctgtaaagcaagaaataacaatagcatttacctcacagggctgttgtgaaaattaaatgagttaattcatacaaagcctgccgacatcactaacacatagtgagccctcaataaatatgagttgttcttgttattggtgtaggtgcctttgaccaaagtcaaggaaacaaatttccaaagtttgaactcctttatgtgctacagtaaaacctttttggatttattaaaataaatgtaaataggtaagcttctttctatgcttcgggaagaatatttgttataatactgggaggaattcagttatatcattaagagcaataaatgtctaatagttcttagatggccagctttaggttcgtgtagaggtaaaatacactatctttacaggccaaggccaaggtttaatcttagctgtgtggtctttggcaaattacttaacctctctgaacctcagcttccttacatgcacatttggtaaaataatatttacttttcatgattgctgagaagtaaatgaaaccataaatacagaggacttggcacaatgcctaacacaaaacctggattggtattcttgggtgaatattttattgttattttggaactgatgatttcaaagtatagtactgttaattttgtttttcattttaatggtgctgtctatagctagcatttccccattccctgtcttccttaattccttaatgtaccttccctgtttagtgtaaaaccttgactttttcatccccttttgaaagcatttttccagagcacattttcgttatgtcttactgggctgtttatctgctggtgagttagcctgcagtcctggccttgtcaggacaaggaggcggcccattctttgtccttttgcggatttcttgtttagtagggtcaactgccaccttgggaagtctccttttcccagtgaaacctagagaaccttcccctggagaaactgccttctgatggattatcttatcagtatttcttgctgtcatttccaacactgtaaattatgatcccatcattgccaccaagtggctgcatgaaatttcatttcctaacaatatctaaataaagttcataaggaacagagatcttgtgctgagtgaataacaagcttcttgcatcagggaaatagtaccttccgagtgaccctttcaccaaaagggtgagaacgtggcagttcagtaagacactgcctgggtttgaatctcagatctgccacttacttcctttgtaattttgagcaagacatgacttctctatgtctcagtttgaccatttataaaatgggatgtaatacatacaaaccacttagaacagtacctggcactgagtaaacacctgaataagttcaaggagagtgttacatgtgaagggaagaatcttgcttctcattacctgctttgttattgctgccctgggtcatctctttccagggtgaggccttgaagctgaatgaagcctaggcaagtacagtgggcacaagaaggagacaggaaaatcgtgtgggttttttaccagtgcagcatttctacccactggaccacactcccaggccccaagccagaggaaagcactgtgagcaagaaaaattaattcccccatctcagagcctggagtgttaacacatcagcactgctgagaagtggtccttaattcacttaatcattaaccacaggtgtcccagtgtgtcctgtgagcagtggctggctagttggaggcagcacagctttttattcctggatgtcattagcatcaacacaagattgaacactttctagctgggcttttgctctgttatttcaataactgaacagaaattatgaaacagctgggaaccatcctggcaaaccagatgctcattgtccaggacaaagcgtgcccatgagctttggataatggtcagtaatcgcatgcacatgtaaatcacacttgtgtttcagggagccgtgtcatctgcatggatataaggaaccccacctcccagtggatcgcaaaagggcttcttgttctaacttacgtgttgtgccaaaggagttctgactttgtccgctttgtcacctggatcctgtgatgggagggatttcctgccacagtgcgggagttgggctgacatccctattttgtagtgtaaaatgctactgaaatctggagtccttttgcccaggctcctgcctacgcttttaagacataggaaggtagagtacgctagtgttttatacttaacagcatttcatactgaaaaaaaacctggagttaggcagttgctgatccttggtgtatctagagtaccttgcatggaaggtagggatggctttttagtgcctgcatgcaatggacatcacacagacctaccctccgttgtctaaggtcttcacagaaccacctttattacatctagtctgtatgttttgtgtgttcacagtcttcttagttattcctaaccatagaactatgacaacaaaatagtttcacatgaaatcttatttcacatgacatttaaattgaattgcttttattttgattcttgttttctttagtaagtggttttatagaatcatagaggctggggaatattaggaacctcaaaagtgatctcagccaattcttctctcaaagcaagaattccttttgcaatattcttcaaacagggttatctaacctgtttaacatataatctttccttgtatgtccgtgggcttgaggcagcacattctatttttgaacaactcctaatgttggaaaagttatcttttcgttgattcgagttcttgtgatatccctgcattaatacaggttgtgccaaataaaactgaaattccctgcatatctgccctagaaatgtgtgaagacattaataatgttttcccacaaatgttaccagttcctgcaacctttctacgtataagttagcatctttagtatcatctcgggagtactggagtggccctctctgtaaatactgtattaataaactggtttataactggcttgtcttcataggactcagtctgagggtctcatactaaggcttcagaatgatgacagtaggaatttgggggtttcatctgcatttgactttcacactaacattcagagtcgtaggtactagggatgtccattaggccattcttgctcctctgtatgacacctgggaaatcccgtgtgactgttctcccaggagaaactgaggctcagagacactaaggagtttgtgaataatcacattgactagcatccatggaagaggcaggatgagaattcttctgcaccgcttcgtgaagctcagtctgtttagaactgtcatgcctctttcagtgtccgcaaagaccagcttgcacacatgtgcttgacagtgcttagccatggggctgtctgctaatcaaaagttggcctgtgagcacaaagaaaaggcttcacttaggcagttaatttttcaggaaagctctcaaagggtaggttggatagtttatctctcatggtgtaaagtaggtgtagaaagaaaggaatgagttatatctggcctgtctagctttcccaatgttctctgattactatttctgagaacattgggaaagctatggtagctttaaggtaggtaacaagttaaggtaggtaacaagtaaagatagaaagaggggaaaatggcaactttaaaaagcattagacagtatcttttactttgtacacacagatgcttcttgtggacccaaatgaggcagcatggcaagagtcaggcatggaatataaatcctggcctcgcacttaccaaccgagtgaacttgggcaagatattggcctggatgtgcctcagtttccttaactgtcaaatgggggtgatgacagtattacctgcctcaaagggttctggtgagaattaaatgagttaatatgagtacagtgcttggcatcataggctgcactacgtaagtgttcttcattatgcatatagttattattatttttgtttttatttcattgtcatatagtgaattcagaggtgccagactgcttcctcatcactcttgtgtccttacataaaaaaaggtttggaactccagttttagtcacaaggaatcatgcccttaccctatagtcattggtttgcaatgatctttccaaaactaaaactttagcaacgttaaatgggaaaatggaatgcccagaagctggaatacctctcatcacaagtatagctcccgtgaagcttatacagaatggtcctatttaaagtgagggggcatgtgtgatgtgcagtcaattcaaaagaccacactgggtcctttcattctgagtgtctttgaacagagagcccctgggtggaggggatggtttgaggtacttcccaaggagcctgacttgatcttgcaccagccgttttcctgtcctctggaggccaactcgggtcttccacagtcacagtagggtttcctctcaccgctttcaggaggtcacccaagatgaaaagcaacaggagctctccaagggcaaataagaattctgcttcgtttcactctgaatggttagatttttgctttgcaatgtagcataaccttgctcagactcttagaatgaacagatttgcaagattacttaatctataccctcattgaaagtttagctgaaggtgacttactcaaggtcaaacaacattcactcattcgtcacttttttttttttttttttttgagatgaagtctcactctgtcacccaggcacaatctcgtacagtggcacgatctcagctcactgcaacctccgcctcctgggttcaagcaattctcctgcctcagcctcctgagtagctgggattagaggcacgcaccatcacacccagctaatttttgtatttttagtagagacgggttttcaccatgttggccaggctggtgtcaaactcctgacctcaggtgatccgctcgccttggcctcccagagtgctgggattacaggtgtgagcccggccatcaaacacatatttacagagcgctgctacgtggtcttcagtgttcgtattggtggcagtgcaggaccagaatctagtctgtttccaaaccattttattctttccccaagccctgttgcctctcttgcctacccctctatcccaatgacacgttgcattgcagctataggatattaattctcagatgtggatatcacttgggtccatataatgggaaatatgatgtatataaaagatggaccagggccaagatttgtttctcattttttggcttattatgacttttcctcattccaaaaggaggagttaaggtggcttaaagagattaatacagcaattaaaagtaaaataaacaagaagacaatgtagaagggaacataaagtagaacggagaaagaagatgcaggcaggagcggggtcagtgcacagaatgcctgcacaacatggcatccagcgctgttgcccagggcggtcaccaatctgctctgaggcctgacacatgagaaaagagacagatgtgaagtggttgagattcatgttgtccatcagataagagtaaaccagttactcagacaagctttctgagatcacactgaaaactatacacttgcctagtaagtagtgcaatgaataatgtctgaggcaatattcctggcataaatgcagtggttagctttattcagctattttgaagacatcataaaatgcaattttatggcattgcagttcatcaaagtcacttctatgagagctagaacaccctggtgtaggtgcgtacttttctgcttatctaaagtaatctaagaagagcatttaaacaaaaaaaaaaaaaaaaaggaaagactgactccacagcccttgtgaggaatatgcatgaggattatctcttaaaactagacctctaatgacaattcagaatttaagggttgaggtgatattctctgcaaagaatttaaacagcaaaaattctacatagccaatttgggataaatgcattacctttgagggccccctgaacaggtgggacaaaattactattccctcattaaaattaactaacaaattcacatgcttgaaagtgcagccacacagcctccacctagaggtagcgtgaggggagcattcatagggaggatcaaaactgcccccaatagatccccagatccagcaatcccaccactgggtgtatagccagaggaagggaagtctgtgtgttcaagagatagctgtggccgggtgcggtggctcacacctgtaatcccagcactttgggaggccgaggcgggcggatcatgaggtcaggagatcgagaccatcctggctaacacggtgataccccgtctctactaaaaatccaaaaaattagccaggcgtggtggcgggcgcctgtagtcccagctactcgggaggctgaggcaggagaatggcgtgaacccgggaggtggagcttgaagcgagctgagattgcaccactgtactccagcctgggcgacagagcaagactccatctcaaaaaaaaaaaaaaaagagagagatagctgtgctcctttgtttattgcagcactattcacaatagaccagatatggaatgaacccaagtgtccatcagtggatgcgtgaataaagaaaatgtggtacttacatacaatgaagtactattcatccataaaaaagtgagattctgttgtttgcagcaacgtagatgaacctggaagacattatatcaagtgaaagattccaggcacagaaagacaaataccatatgatctcactcactggtggaatctaagatgtcactctcatagaaagaaagagtagaacagtggttaccagaggattggcagggggcagtggtgagagactggtcaatgggtgcaaagctatagacgagaggaataagtgctggtgttctattgcataagaggatggctgaaattcacaatgtattacatatttcaaaatagctataaaaggtttttgaatactctcgtcacaaagcaatggtaagtgtttaagatggtagatatgctaattacactgacttgatcattacataatttatacatgtatgtaaacatcacattgtaccccataaatatgtccaattattacatgtcaatcataaatatttaaaataagaacttttaaatatttcatgcctttctctaatgtctaaaataagaaatttaaaatatcttaaaataaaaataaaaaggaattgtcctaaaaagaaatcatccttggcgaacatcaacagaagacaaaagggacatgaagtccctgattatctactccatagagtaaggcaacaattgttagggcctggaaaactttaacagtaggttctatccatcatctccccaccggaaaaaaaattaagaaacttataagaagcaactgaatgtccaattttaaggaatataacttttagcaatgcctacaagaagacatggatgaaaatatacttctaggcagttcaatataggtggagaatctgccaacagttttagagtagttggtttcagccattcttttctgatagcaggaccactatcttcattatgtataatttgaataagatctaggaatgctatttgattctcccctttccctttttttccagtttagactcttattcccttatttttcatgcctttctctaagatggcaaacaggtacattccagtgccaactgtaggtggctctttttagaagaacattctccagttctgtctgtgttcaatataaaagaatgttccagccaataagagctacttaagaagggcatcaaagagtaaaggtctggtacaaagctctgcagggctctcccctcttctattacttagccagtttgcagtattcaacacaacaaatatcactggtggctggcctgatatggaaacaatgggagataaaaacaagtggaacagagatcttgcccacacacggctttcaatctagattgcaaagttggtaagatatactcaaatagccatactataaggtatggaaaggtagccataccgtcagtattgacaggaggaaaaattctacaaagaaatttaagaggatactgtgttgtcttttccctcaagtttcttactatgttcagcgcaacaaactcttaggtgcacctgccaggtgccaggcccccgtctgaggggttggggtacagcagaaatcaagcactggccttgccctcagagagctgcttctagcaagagtcatcagagctttgtaaaggtgtctgcctgaggccagggacttggtcttgcattgatatgttttttttatatcccctccctcatacggctccatgcacaggaggagagaaagcaaatattttttcaagaatggcattaacattgagacacagcagctggaaattggcagggtgccctcagaaggttgggaaagcgatttatttttccaacctcaccacaggaaccaaagccctggcagatgcctccatgtgttagcggctgctgatccgagtgagatcattattaattattagttacttttgagtgtctttctcagaaactacagagtacttgggaagcccagacgctcttgagttgcaatcaatactgtatacaccttgcacagggacctgagtggcatgtaattataaaacagtattgattcctggcaaaggggttcaaaatgtacaaatccttcacataaagatcagctaactcttcaaagggcttgattattttcctttccttaagaaagagacggatggttggagtaagaaatttgaaatattagctaaattagtgctatttcctgccaggatccagatctgtacacataattattttattctctgtgctggcactgattcactttggttgagtattggaaatgtctctgttttgggtctgtaatccaaattattcagtcagtgcctatgctgatgttttctactcgcatcttcctgtattatttttctgtaaaacaaatacttgcatgtctgggacttgcctcatgctggtacccaccccactcctacttttcctgctcttctctatcccatcgtccactgtgccccttggccggggacttcacctgccctcctacaacctgtcgtcaccaaatcctgcctattttattttggcctaattctaatttctgtttctaaattggtgtccactgaagtcctattagaatgaccagcaacctgtatagttgttagtctttattcctcttggctgtgtctccatcctcagcagtgattataaacatggactctcatcccgcctttgctgaaatcatcgatgccctatcattttatacctagatccacagaatggccttgcactgcttttcagcttctagtcttgccccttttcatggatgatggggaggccttttgaaaatgcaagtctgatcaagtcatttggctgcatgaagtcctccaatagctctccttcgcctgcaatccaagatggaaaaatcattgttgatctggaagtgacagaaactgagtcttaagagacgcagcttatctcccaagactcagaggttattggaagacagcaggtccggaggattgctgcaggagctccatcgggaaggtttccacatgggcttctctggcattctgaatatctgtggttggtttagctggggctgagacacagaacttgtgtaaaaaactatctccctggttgtgtagagctaacttatcagtgtgagacagtcacaatttattccactctgggtacctcatgtttcctaagctatgcaatgaagtcttgttgagaatgtgacaaggaaatggtccccctggtatgtcccctctgaacttcatatatgaggaaaaagaaatcccaaagccaataaaggatctgacacaaagggccagccgcctctctcaaaaggtgcactaatgccatgatgtatgggaaaagacttggtaatatgtgacaatcctgtgccttgcacaggatgtttggcatcactagcctctcatggtaaatgccagtcatgctcctcagtcatcagaaccagcaaaaatactcctcacatgtccttagatagttgcaaatgctccagagaggggtaatggcactgctcctacttgagaaccactggctcctgtaactgcttggcctagttctaacttctaaaatgttctcctttcctgagagtataatgaagagccagatactttgtgatctttctatcattcctctggcttcttggacttccttaatgattgagctcagatgctggagtcacatcgtctggctatgaaatcaagctctgccatttactgggtgtgaccttgaacaattacttaatctctccgtacctcagttttctcagataaaatggagataatagtgacatccacttatttttgtgaagatgaaatgaaataaagcatgtaagctgtttatcacactgtccactgttggaggcatggtaattgtatgaggtgatgacgatgattgacgatgacgatgatgatgatgatggctcccaagcataagggtcttattcgagcaagaacttgaaattgacacttaataatgaatactccagaaaacacagacaggcagcatgatatatgagaaaaggtagcagactaggtgggagtcagtaaatcctaaagcaccctctgccatcaattctgtatggctttgaatatgtcacttcaccgctctgatttttacatatctatgaaatttttgtgttacatggtgttaaacagattgaatgacttaagcattgtgaagtaatttcataaacaacttgatgatatgtaataaataacctgttttgcattggtgttttctacgcctgacttgaaaaccctcaccagctgtggggagaacacacttaacaggaacgtcttggtgagagtctacttacatggtaaatggaagtatgttatgcgtgacactgaatctctctctctcacccgctccctgccagtgtaccctccaacagccccggagagaagaaccttggagcatttaggcatatctcattaaaagttcatgtctggggttcaacagcttttcctgctggctccctgacaccccccaccggggcctgttgccttcatggttgtctgcttgttgccccacagcaacaaaggcgagagaaggagctgcggaagcagcaggagagggagcagcgccggcactatgaggagcagatgcgccgggaggaggagaggaggcgtgcggagcatgaacaggtacagctgggaccaggagccccactgatggccccccggggaccccagcaccagccttctctggggtgtgggtcaccttttctgaggaatgctcagtttacatgggtttttactcttcctcaagcaattatgctcacctattcaagaagtcaaatgtacaaccttggcaatgcccacctattcagccttgctttctacccagacagagttccctgacatacccggatcttccgattctcccaaccctcggtatctgatttgaaggtagcactgaagcatgaaaaatcagccaagtcccactctttcactgcttcagaagagcttttctactcatgccatctctggtctttatgactttgagtcattgatgcaggcccatctctctttgctagaatcacattcttacagcatagtgaaactctgcaggatggttccattacaaagacagtgcacgatggcattcaacagttgtcttattcctgctgcttgcacaggagcctctgaactttatagcattgttaattccaggtagtccataaagagaggaacctgtaatgaaaagctttaacatgtagctgggcttattaaaaccaagtagtagcagtaaaatgccgagacatcgcagtcagctgttgcaggtagaggggcttgtgcttttcattatgttgaaatgcatttgcttccatgtgacatactcttcctgctttgtaagaaggtatttgggtatttttcccctccttccttctacactttacttagcggctcttgtcgcctttgaaattactggttcatttctctctttctttctgttcctctgaattctctgctgcctacctctccaggaatacatcaggcgacagttagaggaggagcagagacagttagagatcttgcagcagcagctactgcatgaacaagctctacttctggtaatgagaaagccaagaaccagctgacctgctctgtgttcatcttgcaagtgtttgtgtgtgtgtgtgtgtgtgtgtgtgtgtgtgtgtgcgcgcgtgcgtgtgtccttctaacataccagtccagaagaggggatcttctaagcctcagggacctcaaaaacctcatagaaacttaatacattttctgattgattttgctgagtcctaatatatttaatacagttgttatgcattctttattaactccatttatttgtacaacttgaatataaatccagccttattataagtacaaactgcttttgagacctactgtgtttattgcagagtaatttttaaggccatttgcgacatgctggaatacaatcacagcaaaatgcacctctcccataagaacccatcagctctacagtcatatttcatttacagactattagctttacccttacgatgggaacattttgtgtcccttgctcatgcagcttccacttgaagtacagtacttttttattattatagcactgctctccagatgggctttttggtgtattttttaaaactgaactttttatttaatggcattctgatgttttttagcctgtacataagcttgctaatggcctttgtaggtccaagttttattaaatgaaagatgatttaggcactatctttggctgcttagtttgtacttaattgtacatgtttgagtggtttaattactagatcaggaagtgggtgactttttctaggagttgtatgccgaccatttaaatgtcctcattattgccattttgtcacttgtaattcatcagggacaagtcattttgtaattgatggggttcggtagggattgccattttaaagcaatagcgttttcattaaatgacacattcttgtgtagatactaacacaaggcagtagcttatttctgtggcacatcctgacatccttctgtcattctgttggtattaagatcctttgttatttagcattattttgcctccattgcatgcttatctggtactggccgatgatttctatgtgataatttggccttttctttgctcctctttcctgatctggacaggaatataagcgcaaacaattggaagaacagagacaagcagaaagactgcagaggcagctaaagcaagaaagagactacttagtttcccttcagcatcagcggcaggagcagaggcctgtggagaagaagccactgtaccattacaaagaaggaatgagtcctagtgagaagccagcatgggccaaggaggtaagtaagcaagggtagcctcaccctgttggccaggcttttgactctaatgagtttgtgtgatagaagtggagagttaacccagtgctgcaaagttggaaaacaattcatcataagacacatgctttgcttttgcaagaactataacattatttctgtagagaaatggcaagataccttccttcatttgtgaggttttgtttttgttttttttttttttttgtatatctttgtggttgcaatggacttttataggaaataacagaagatagaaaaaaccttttttctgttactcatccaattgaatttgtggcatggaggatttttagtgacctttttgttgaataatgtgattaaggatttatagaattctaggaagaatcagttcctgtccatgcctggaccctgttgctgatcattaacattgtcactaacataactttgttcactgtgatactaccagcagatgcacagttgacctcagacttgtggtggtggtattcacttttaagatcagaggtcattagtgtttcttctacacatacttccttcatttgcttaactactagactaagaaaggattttcaggaacttagcactatgttgagctattttaataaaaactgcttggatgggagggaaaaaagggtgatagccagacaggtaaagcaaacaaacaaaataaccccaaccaaatcagcaacctttccagggagtcactgtgtgaggtcatgtgcataacacgctggttttcagttcaatcattatttctggcatctagtgatttcctttattttatggtgatcatagctggtcatttaaaaggatgttttggagttattttgtatttttatctagaatctttagatattgatagctcacgcttttttcaagttatctagaatgcaatattactagaaccagatttcttacataagatcctatttttatgaaaataattctttgtatttgtctaacctatctgacatatgtacagaaaatacttgacataatgttgtcctaatgttaatgatagtggtttatgggagcagaaagtaaaaaaaaaaaaaaaaaaaaaaaaaggatttttaaaaacttttttgtacttttacatattgtttaaatcctttagagtgatcatgtatttttttgtgaaaataacttttttcttttaaaagttaaactaagtgtgtggaaaaattgttttgatttgtgatgaagaattttttatcactttcccttacatctgtaaacatgatccatatttacctatgtctctaacatctgcctctttctcttagatcagtaattcaattttgtgatcctactcccaggtacagcatcgaccccttaataatccacctgttcttccagctaagcaaaatcactatgctgctaaacagcagctgacatgcttcttggctggcaggcatgcaccaccttcctctactgctaaaccatttcctagccatgccaagttgaaatcctcagctaagccagacccacagctcctgaccatggcaggtgttcagaccactgaaaaactagcctctacaaagctaatgtcagtagcacctgcaggaattaatgattccagaccaagactcctgcttgagcatcacccatgggagaaagatggacgagcttgtcctattagacttggtttggaagaacaaatgaagcctcaggaagtcttgaggaccatagtgagatctccaaggcactctcactcccaaggatgtagcccaactcgagagttaggatctaaggtcatttgtgtgtcttctcccaacgtctccaaagtgacaagccccgagttgtccattactgcaattcaggagggccttagagattcatgtagaccttggggcaggaagagcatgaactcatgcatctttacaagtgcttctacttttctaagaaatgctgcatcgctaagcgacctccccttgatgcatgaccacttggctttcagtgttcccagccccaagcatgagtttaggagagggacacctacagatcccattggaaaagatcattatgttgtgcaaaccattccagaatttcttctttcccctagacagctccctcatgcacaaatgtaccagaagagggggaaaagcatgaaacagttttcacctccttcattcagcctctacccagcaccttgtgatttgaacttgtctaccttgacttcactgttttccagttgctatttgtcctcatcactaaatttactggtctgtcctctctattcagaactagttcatagctcccaagctttcaggagacatggcattcctgggggcagatctttgcagatgtcatcaaggcacttttctagacctcttaattccctcatgcttcctggtcaggctcctagcagtaaaagaaacacagcatttgagcatgcaaacaacatgcctgagtcatcaagcactcctgatgtgaggtttcccagtcaccataagtctgggccatctctggtgggtgacatcttccaaggtccctggcttcctggcatctggtgtgcttcctttgggcttcacgcatttccacagatatatgggaacattctttggggatttcatatttagtcctctgctcctgggtgtggttaacataatccagcttccaactaaccgttgtctgttcatgaaacagttcccaagtcttagagtgggtgatcatattttagaagaaagatgaaacatttagttgatagaaggagagtgacagtgctaaatttaggactggagcaatcgatgtacaaataagaacaaataattgtctgccttggtttgagtcatcatttttaacacccacttcttagtaggaataaaaatcagtgcaaggatctttacattcttgatcttttaatgcttctcatcagcagtgtatgaactttttatgtaaagcattatttacagatgtcttttctcatattaggaaggcaggggctcaaagtgaccaagtagtaatacacgtttcaaaactttaaatatgaacatagcttatcagtatcttaactatcaagttataagaaaacctgggttaaaccctctggaagtaaaataaaaggatgccattttctttttttcaaatgcaccctctgtgcccatgccaccgtctcctgttgtgtagggtctggactattttgccccatgtgccactgaaggtatcacctagctctcttccacctactgcaacctcttctgtaatctgttccagcatttgttttgtaactcagctctatgccgtctcatcaagtttttttttcttcttctttgcttacttttccatctacttctcctcttcctcattccaaatcgatagtcctttatcagcaatgtaatgctcttatactgctttgttctctctgttcttgtttcttcattttgtaaaacacaagtgatcactgcatttctgagtacctttctgattaatatgttggatattgtagagcaagtgaaaatgctcagtcatttgcaaatcttgttgagctcttctctccctccttttactgagtattctttctgtcctggatgtcacattggccttgatttaaaagaatatgaatgtctctgcattaaaaagacagcttggagccaggcacggtggctcacgtctataatcccagcactttgggaggcaaaagcaggaggatctctggaacccaggagtagttagagaccagcctgggcaacacagtgaaaccgtgtctctacagataataataaaaattagctgggcatggtggtgcatgcctatggtcccagctacaccaaaggctgagggtgggacttgagcctgggaggttgagactgcagtgagtcatgattgcaccactgcactccagcctgggcaaagagtgagaccctgtttcaaataaatacataaataaatagacaggttgggggcattctcactgctttcaaattatctgccatttctgagttgagatggatgtcaggtatgtactgtgaaaatatcagtatgatgttctgttgaacatcggcagaatttgaaggtcttcttcctcactttttggatgatggagattcctttttctttcttctgctccttaaatggcatgtgattttctgggcctggcaataactgtgtgggctccccttccttttccatcccacatacttaaaaaaaaaattgtaccaaagctcagcagtgaaagaatgctttgtttacatgagtattgcatgagattgtattttaatttttttagcactccatcgtgttctctttctgtgatatatgccagtcctggagtgtttgtttgcaaacatcaatctgataagggccaaaatatctctttatttccattagttcactggactttgaaatcactgtgtataaaaactccttctccatccggatttctctgctctatacctaagtgatttctttttccttttatattagttagtttatatataaagttcccaaactagcatttagagagtttatatctttcctccatttctgcatatctctcttatgattaaatataggagagacctggaaggaaatagtaaggagtatgtttgagttcaagttcttccacttcctgcctgcctgacctagggcgtgtctcctgccttcctgagatgcagcttcctcatccgcacatctgcctcacaattgggaagctcatgggcaataatgaatatgcacgtgccatttaaagttacatactacacaaattcaaatgaaatatggtattcaacatattcctattttgtttccaagactgttgtagctcatgaggaacaagtgttctgtctcttgttttggtctggatttcatatgaccaattcactggcgtcgcctatctcttcacccacctctcccaggtgatagataagcacttctttatttcctatatcaactttctaagattttgcttcattacttttaagtatgtgctccattcacacagggatctatacgtttttctggaatattagtaagaagttgatctgggaaaatagtccaggcccttagagtcagacaagattgcatcttaagcattccttatgaatgagagtctcccccgttctcagaggtgacccggagcaggggcatcctcaaacttgctcagtaaccatctgcccatgtggttttgcccaacgatattactcagctctttatgtgactagtgagtacagggtcaaagtatctaaggagcacttaaaagttacttactggcttctttctctttctccagcattgccaataaacacaaaaaccaaactgttttgtccagttggggaaaaaaagagaatacccatatgattgtgttgaattcaccatgtattaattcttaagtaaagccttctgagaccttcctaaaccccgtggactctacatattataaaatattattagaatgcacccatatgacatagtaaatatatatttgctgtcaacagttttaaaattacttctataaatgttttgaaattctcagtagatgttattcattattgtaaagtgagacactgtaacctacaaattgttttaaaatataaaaaacaatttgacaattgacattgatacagtgtttctctttattatgttttaactttttaaaaaatttattttgaaattgttttggaaatcctgaaattaacaaatttatttttaagttgtctatatttgtatagcctttatatatagcagaggccatagacattactcctatcctaggcagtggataacacagacctgtctagagcagaattttatttctgagaccacagttattttttttctctctatataatgctatagtaaatagtatagcatttttgcagaggtgatccaaacttctccaaagttattttagttttcatgttgaaacgattttttaataagaaaaaaatacttttatagtgaagttgatcagtctgtgctaaccttctctgtatttctgataattccttctactgtgaaatcatttataacaggtatcttttgttgttatggtctagcaccttcacactccatacctgatggtactggaacactttctaattggtgctcctggcattttatgtcttcttggaagcaggcagttggagcagaaacttggctcctagacttttttgaacatcctcaggcattgaaacatatcttgttgttcccagtttttaatcacatgtatctttcttctagatgggagaggttttggagggagactttctttttttgtctcacatatttatctcctgttcagtcagcagacataagttgtgataaaccagggaacaggcctttgtctagtatgaaaataatgaaaagggcctgcctagataccccatccagctttctctctgtccatctgaaggtattattaggagaagtgccacttccaatgtttgatttgatcctttgctccagttcttaaggtgattctgcagtgtaaagacacttgggcggcattatcttcctaaagacttcaggactaggttttcttgagacaaagtacgtaatgagatgcctcatcgttacacccttttcttagattttcaattttctttggacaaacttcaacccaggaaatttcagtacactggagccttcctgaaataattttcaaagtgtaacaattacttatgccatatatttttagaatggtaccgactgaaatatactaatgatagaatttaatatgtaaactgttagaaagcataagaaatttttactagaagtacattagcaacatctatacatgactaatcaaatccattcattgcctgtgaaaaccagtaccctagtttctgccctgttcatttctttttttttttttttttttttttttttttttttttttgagacggagtctcgctctgtcgcccaggctggagtgcagtggcgcgatctcggctcactgcaagctccgcctcccgggttcacgccattctcctgcctcagcctcccgagtagctgggactaccggcgcccgctaccacgcccggctaattttttgtatttttagtagagacggggtttcaccgtgttagccaggatggtctcgatctcctgacctcgtgatccgcccgcctcggcctcccaatgccctgttaatttctaatgatagctttagggccccctgtggcctgtgatcctattagcagcagggatgcttagactggggccttgttgctgacacttcccaaaagaattctttctttatctcaaaaatggtttctttgcccaagatagagtctttgggggcaaacttttctactattgtttttaatgtgctgtcccttaatgtacatttaaagctatcagtgtattttagagccaaaaataataattacaagtattcctcactctgcatatattttgttcctgaattttgggtgacaagtggtttggatagtgggaattcagacactgaaggatgcttatgtatgacttatctattaatgatctaccctgaaaataagaaaatggataatatttgaccaattccagtggtctagaaatattaaccttctttcaaagagtctggcatttggaaaagtgatatattgcatgccttgatctcagtttatctattgctgtctttgtgggactttttcttctttgtggtcttatctcaaagctggctttgttcttttgctcaatgcaatagccaaataattattgctgatgtaatacttcgcacacatgcacacacaaagtacacatgttctggtttatattcctggctttttgcagcaaatctcatttggtgtgtggtaagcttctgggacacgggatttcaaaaccaaagccaattgtatgtaccctgcacagccatggtgggggaagagatgttcaaattactcctcactagaggcaggagggctgtttttcattctgtagcttatcttattgtgttaaaatatgtgaggttagtatgagtttaaaaacagacttactttgtatatttgattgagtctgcctctagaaagattcaaaatgggatagggaggatgggggaaaatagctctttcaagtttttatttcaaatcaggcagtaaaatgaataaagacttttagctgctacataaaaaatatgcaaacagacatgaatattgaacatctgcacgtgggttcttaaaatgctcagtgagtcagcagaagagaattaagggctcactgtaaaggccatcagtgtggggagaatggttgcattgtcctggtggctttgggaagcacaacagtcaagttggtcctgaagaaataaaggacaggacacagtagatctggaagaaaagtcataggcttcttgaagttgtctaagatcttaagccatatcttagagtgcgcaccttgtttatctaagtttctctttaaaattgccctccgaggcagtctttctgctgtaaatatgtactaaaggtaatgatgacctgtttagaaagggcattcactggctcagcatttcccgtgaagcccttgggatctgttatctgctttgggctgaaagagaccctggaagaaagggaatgacaaggaaatgaaacagcctgagagaagacagggttagaggggaagagaaaggaggagaagcaagaatgaacaccacatgtgtagaaacagggaggaagaaaggggagagcaagacagtggagtccaagctggacatgaaagaatgagatggggcagtgtatttgaggaagcaggaaagacaactggaaagaaagacccctaaagagagaaaaagaaagtgatacaggaagcctatttgaaacacgccacgcgcattaagcaggcagcctggaacacccacttgtctatcagtaggacacgtgaagaaatgcagggtgcatgcactcagcttcatcctcttgttcttcctctcatgttccatgagtcaacccaaagcaattttctatgttccccaagccatctaaatgcatgctaccattccctttgattgtctagagtgcaaactgtcttcctcactgaccccatggcattgcgaccaatcagtaagataatatcacaatcaatacaagataaactcttagcaggtcacgaattccctgctaaccgaataacactagataatgggtaatggaagagtgatggcttgggtgttctattttgttgttgctgttgctagtgtttgctctttgcaaactcttgatgcagcacagagttttgtcttcttaaaatcagttgatcagaggattcaaatggctgtgcaggtgactacagaaaatccttgctagaaggtgatctacttctatacattgaggctgtcttttttttttttttttttttgggttgtaggtagaagaacggtcaaggctcaaccggcaaagttcccctgccatgcctcacaaggttgccaacaggatatctgaccccaacctgcccccaaggtcggagtccttcagcattagtggagttcagcctgctcgaacaccccccatgctcagaccagtcgatccccaggtacagtctgcctccattccatcaggcattccaataagttgcacaagaaaacctattattaaaagcctagggaattgtaacatggattcaggcacaggatcaaattatgacccttaatatagaatttatagtaaaataggtggccccactgatttttaagagtagaagaacaggtgagaaagaaaaaagcatcacccttaaacttgagtcaaccacaaactcacttctatttaaattggcctctctggggacccataggagttcctgcaaggtgagaacaagcattcttttagttgcaattgccaaaactagaattcatagaaactttgaggtgtgtgtatgtgtgtgcattatatattttttgttttcttgggactttggcatgagcctgaaactgaaaaaattaaatagacttggttaagtaaaattacgtcttctaagccagtggttctcaaagtgtaaatcactggaccagcagcatcaaccatcacccaggaacttgatagaaatgcagattattgggcccacttcagaccaactgatcagcaactctgggggtgggggaggcctggcagtctgtgatttaacaagacctctaagtgattctaatgtactttagagtttgagaacaactattaaaagctatagggtaaagaaaaaagattactccacttttaggaaaggagggggtttctggaagttctgcaggacttttaagttatatatgccaaaaatgaaatatgaagtgaaatagattaaggaattccatgaaaaataatgtagtttcttctgccaaatgtcttaaatttcttccaggcatccacctgtgttaagacttccacgaaatattttaaggtcacctttgaaatatgtaatgctgtttgaactggagtttaaaagagtagtgataaaatcaagtattctttgtgttttcagtttgcctttagtaaataaagtccaagatttttcagcaccaggcagcttggcatatcttcctcttggctgtttttaatttgtatataattctttcatgcctaaccctcaaaaagatacatttttttacaggaatttctattttaatgtacaaatatcctcttttaaaacccctaacgttgaccttggaaggtactttggcctttaaaaggggagaagagagggaaaatgtacttgatgagaacaaccagagtgaaaatgtagatattttgtgacagttaattcacttaagctttcttcaggtgcttcagtttgggggttgtgtggtgtggttttttttatttttttattttttggctcttttaaagtgggtttgtgttttatactagatatttttttaaatgggctttgttttaatattattatttatttaatgatatttaacattaatataaatccagtaggttctattctggttgaagcttaacattcagctaaactgggctttgaagatttcctctgaactgtcattaataacattccagcacttaaatttaaaaccaaagaggatttgacaggtccttgcacaaaacagatattaaactaatgtttgttgaattaacagtgtaatttagaaggcactgtagattttttccccaaccaggatttatgggacaccttccccatgccaggcacagagctagcctaggggatatgacgatgagcatgacagacatagtgcctctctctagggagctcaccttcgtgaagtaataggagacacgcttagataagcactaactatgaggtgtgagcagtgctatggcaaagtggtgccctgcactctggattttaatgatttgtctttaagagccacaacttcgctgaaagactgcctgtcttccctgcgtgaacagtatcaccacatgcccagttggcctagttgagatacttaactcaaaaagttacatcctggtgtcaagagataatacgacagcatagatggtaagagccagcacaggagaaagtagaatatcatagaggttaggtttatgagctatgggtgtagaatgcctggtccagtccatgctccagcaggtgttatctgtgcaatctagggtattgctaaacctctctacaccttacattgctccggtgtaaaatgagggaaatgactgtatccacctcaggatggactcagtgagttcataacaagtaagatatttagagcagtttttgttttacagagcaacaccctctaatgtaaaagttaggggttttaaaggaggaatttcataatattagcagagaagtgcttataaaatacattgcattgctggtcaataaatattcactaaatatacagtagttattgttattatttcacacattccactgacttagcgttcccaagtaaatcatttaactttgtgccaaccctacatatcgttccaatggaaaattttgaagagctgttaaaaaacatgctatatatagttgtgatagactctctatagtccaatttttgtgcccttgaacttttttttttttttccttcagctcactgaggtactggctgatctcttttttcttctaatagtgctgttttcatgttgttttgatgcttagatcccacatctggtagctgtaaaatcccagggacctgccttgaccgcctcccagtcagtgcacgagcagcccacaaagggcctctctgggtttcaggaggctctgaacgtgacctcccaccgcgtggagatgccacgccagaactcagatcccacctcggaaaatcctcctctccccactcgcattgaaaagtttgaccgaagctcttggttacgacaggaagaagacattccaccaaaggtaatatttactggggtgttttttttaatcaccagcatcactgatgatttttattaccactattccagacctttcgtagtagtggagaatgtgatcatgccaaagcacttccccttctcatgtttgttttggtccctcttcattccctggctaagacttggattgccatttaccatgtctgacctttatttcccccgcaagaaaactgaagtcaggtagattgaagcacagatcctacgtccaaagttagaactctcaacaccaagtattccaaactgtcattttgctatccatattaacaaataaagtaatggatatttcattgatgactgaatctacatcaagacaattgaaaacttccagataaaaagtagaaaatccatgtattcctatttttaacaacacaaaagtgaagccagatttcaggggttcagaagatagtattgttcttaggatattttagttggccccattttaaggaaagctctttctaggccaagtcataatttatttccatctttaattaactactgaggaaaaaccttagggtaaaatgaccagccattccactggacagaacagccctgagtttgggttcttttgttttcctataccaagtcattactcattccaagaaatgttctagaatgtggctgtgtgcatctagctacaaacaacctggaagtatttcaaaatactagagacattttttgcatcggattcttcctggctcaggaatcccccttttcctgagattagcatagaggctgtgacaaatggaatgttccacaatttgcagaaaatgccactgttaattccagaagaaaaagaagcttttactcaattacaaatacatttcctcatcttcctcttaaaaggatattataacaagagtcccattattttgaaaataaaaaaagctgataattttttgagattctttgtggaagcagaaatgccatcagaaaaaaaagggtacatagggagcaaaagtcaatatgaaaaataaagtgggcaaaggagcagacacaatagatggaaaagctgaaaactgaatttattggtccactctctaaaaatacgcaggcatacatgcatgaacctgggagaaaattttagatgaattcaaaaacttaggttttaagaattcgttaggctcttctgtctctacaactatgtacatttatggtaaggaaaagaaaaaatagtaataattaatttgaacaggtagtagcattgatttggtcattctgctttactttactgactcatctttatgttaaaatgaataataaaaattaaattttcaaaacaaaggatgacactttacactgaaagtaattttctatactaggattcataatatgattcttttaaataacggactcctttggtacacttaaaatatttaatttcattttaaaatgtctgttttataaattgggacatacttcaattctaccttaggtttctgccagataagctaataatacattttcctcaagtcttattggtacttacacagcctttttgaagatccttccagtattttcagtattaattctgctttgtattatgttctattatgttcactaattgaccaagacacagtgcttttggtttttggttttagtaggtaattgcaaatcaattagaaagtagaaacattcaagatctactgtggtaggttctctgagctcaccaacatatgacttatgtcttaagctctatcctgatattctagtttctcaccagatttcatgatttccttatctgtttattgtgatgtaagctaaaagtggaacttgcttcatctgggtggctctcagctgatgcaacttccaatgagttaatgataccctaaagaaattcctggtatttaccacttttgcccaaccaagagaggtcaattatttttagctcagtgtatcaaaattattagctttacctatctttaaatttgtttttaagattgaggatgaccctctttaatggttcccaaatttgctcattgttttttgccagtagacctttgtttgattttgtttagggagtttaatatttcttcgaggaatgaatgaaagatagttctttactgtttcggatagtttctgtggcttctggcaaatcattggaaaggaggattttctgacaacaggctatggaagctactttatggaaaatatttctgaattctggtttcttccaggtgcctcaaagaacaacttctatatccccagcattagccagaaagaattctcctgggaatggtagtgctctgggacccagactaggatctcaacccatcagagcaaggtaagaaaggaaggtggttatggtaaaagaagaaactcctacccaccattgtcattattgctttcctagaaatgcctgtgttcttttttctcttcagaggcaggttgactttccatgtgcactataaacgttgatggtccagaacacatgccttttatttcttcagtagcttttcagagaaatcagtattcagtggggggctcatgaataaattaattaatggggcaacccagaaaccaatcagatgtaccttagcggacagtttttaaaatctgagagtaaaatttgcaaatatggatctggttgcaatgccctaaagcattacttcagagatcagtttagagtcagcagaacaaaatgacctgttatggcccatttcgaggtgatttttagcatcaggtcaagaaacatgccctgggaaccattgagacattacaaagcaattaccatggaaatagtgaccatcttcagagcttctctagcttggcagttatagaagaactagctcttacgaggaagttgcctctttggcattacaaaggtcactgaaatacagttatgcttccactcttgctctgtgtcctccttccagaatttcctatcaataatgtacattcctacagtcagaaagttgcatccacttccactggttggtgtagaggtctcaagaagctggaaagtaaacagtatctttagtgtctgagcaaattttttgtggtaacagatgctgtttgctgttatagttcatcaagcttccctcagatttttcatgatgaatacatcactttttaggatcaactgaaatagcaaatggcctctgctaaggctataaaaaggatgtgattgggcaggctgttttcttcttcattgtgttcataataaaaggaccctcctttgctagtaagagagaatgactggaaatgaagcttatgattacatgcacatatctttaaaatatggaatgctttaaatcataaagttttaattttcctcttcacatgaaaagccttagggaaggggtcagcccagcaataacatgaaactatactaagaacatgaattcctttagggcaaagatgctagcccattctgtgtggaattaccaattgcaagaggctctgaatgagccattttttttccagtgacttgtctgattcacactgagctggtattgctaagcagctaagcagcactgaggaagactagagccactgtgaccaggcagccaagggaacgttagtgctggatcgccagcctgaactttatcagtgcccctcttcaagcagtgataaatccccaattatcagtgctcctgcttcctttgaaccctgcccccgggggctctgttcattggatcggttgcttagaattttagtttctttagatcaagtattatttcaactttaagtatttttccttctgtcaaccaaaaagagaattaccatcatatagtcaaataaaaagccatttccattccctctgaagtgctattttagtgacattaaggcctaagataattggtatttgatggtcagtggtttacaaaataatgagccttttctcttggaaccacttggatattatactttatccaaagaatgctgactttgtgagagacagctaacatttttctatttagagaggaagggaggaagtgagttaagaggtcatagttccttcctataatgaaagacagagattgggggtggggggtgaagaagcctcttctctgcatgtaggacagtcctacagaacacccctttttatgctatcatgtatctccatgtggccagcatttaaggtgtaaatcagatttgcggttctagattggattgcatttttaaaagcttcaagatttgttttatttacagtgagagccacagctttagttcacctttgctgcacaatataatcaccataagtttagtgacctaaaagaataacagtttaatatttctcatgatgctgtgggttggctaaggagttcagctgctctcgcctgggctcactcgtgcagttgcactgagcagatggttctgctgtacctcttgctccacgtggtcttccattctgggcttctttaccctttggtgatctcagaagagcatctcaagagagaaagctccaatgcactagtacttttgaagcctttgcttgcatcatctttgctgataacccattagccatcacaagtcacttggctaagccctgagtcagtatgggaaggaactacacaggggcatggacactgggagatgtgatttgccaggggccattactgtgacacagacctctcctactctctgttggtcctaatgaagtccgtatagttctttttgtgccatttatcagacaaccatccatccataaagccactttaaaaggtgttgcttttaaataacctgtcctttacagtgcttccaagctttcctgtacttggtcaatattctgtttttcctcctagtcttttctttgaagtgattcccaagggtgactagaaaattagcaaagttaaaatggatgcagtaaaaagtacacagctaataagggacagattcaggatgttttgttactatcagtttttaattcatttgctaagttcagcaaatatatactgaagctgcatgtggccctgggacccagtgactcaaaccaaaaccgcctgactccagggcgcaggggtcgtaatatacctgctgctctctgggactacgggtactagtaggggcaaaattatatttcttgcctcactttcttattttgctttgaattaactaaaagaggcagaacctctctcttcttctgtggcaaacttagggaccacaattttaagacaacagtgtctcaacccagaaggaacctggacccccaagtcaccacttagagaaccatcaaggagaccagttctacctctgtatattatgatgtgagtgagaaataaaccactgttgtgctaaatcaattttttaaaaaaagaggccgggcgcggtggctcacacctgtaatcccagcactttgggaggccgagacaggtggatcacgaggtcaggagatcgagaccatcctggctaacacggtgaaaccccgtctctactaaaaatacaaaaattagtcgagcatggtggcaggcgcctgtagtcccagctacttgggaggctgaggcaggagaatggcgcgaatccgggaagcggagcttgcagtgagccgagatcacacccctgcactccagcctgggcaacagagcaagactccatctcaaaaaaaaaaaaaaagaaagaaaaaagaaaaacaaggcagagcctaacggttaagcaaaaacggtcagtttttgcttcctgcacttagtagtaatgaactccagttactaagtgcaagatgttttctagtaactgcagaatgtttgatgttttttgatcatttgggacacatatgtttaaatcagtaaactatttagtaccctgaagagaagactcttgaattaaaatgatcagtatgcaacggtatacctgtaacttgaggacaaaagtaaagcttttactattttgaatatccttccttctcccccaaataactccctattatgtcactcttccactgtctgtatgcaccataccaaatccaaaagagccctatggagaacactttttttatatactttaagttttagggtacatgtgcacaacgtgcaggtttgttacatatgtatacatgtgccatgttggtgtgctgcacccattaactcatcatttacattagctatatctcctaatgctatccctcctccctccccccaaccccacaacaggccccggtatgtgatgttccccttactgtgtccatgtgttctcattgttcaattcccacctatgagtgagaacatgcagtgtttgtttttttttgtccttgcgatagtttgctgagaatgatggtttccagcttcatacatgtccctacaaaggacatgaacttatcattttttatggctgcatagtattccatggtgtatatgtgccacattttcttaatccagtctatcattgttggacatttgggttggttccaagtctttgtcattgtgaatagtgcctcaataaacatacgtgtgcatgtgtgctgctttatagcagcatgatttataatcctttgggtatatacccagtaatgggatggctgggtcaaatggtatttctagttctagatccctgaggaatcgccacactgtcttccacaatggttgaactagtttacagtcccaccaacagtgtaaaagtgttcctatttctccacatcctctccaggacgtgttgtttcctgactttttaatgatcgccattcactggtgtgagatggtatctcattgtggttttgatttgcatttctctgatggccagtgatgatgatgcattttttcatgtgtcttttggctgcataaatatcttcttttgagaagtgtctgttcatatcctttgcccacttgttgatggggttgtttttttcttataaatttgtttgagttctttgtagattctggatattagccctttgtcagataagtagattgcaaaaattttctcccattctgttcactctggttggctgttcactctgatggtagtttcttttgctgtgcagaagctctttagtttaattagatcccatttgtcaattttggcttttgttgccattgctttgggtgttttagacatgaagtccttgtccatgcctatgtcctgaatggtattgcctaggttttattctagggtttttatggttttaggtctaacatttaagtctttaatccatcttgaattaatttttgtataaggtgtaaggaagggatccagtttcagctttctacatatggctagccagttttcccagcaccatttattaaatagggaatcctttccccattgcttgtttttgtcaggtttatcaaagatcagatagttatagatatgtggcatcatttctgagggctctgttctgttccattggtctatatctctgttttggtaccagtaccatgctgttttggttactgtagccttgtagtatagtttgaagtcaggtagcatgatgcctccagctttgttcttttggcttaggattgacttggcaatgtgagctcttttttggttccatatgaactttaaagtagttttttccaattctgtgaagaaagtcattggtagcttgatggggatggcattgaatctataaattaccttgggcagtatggccattttcacgatattgattcttcctatccatgagcatgaaatgctcttccatttctttgtatcctcttttatttcgttgagcagtggtttgtagttctccttgaagaggtccttcacgtcccttgtaagttggattcctaggtattttattctctttgaagcaattgtgaatgggagttcactcatgatttgtctctctgtctgttattggtgtataagaatgtttgtgatttttgcacattgattttgtatcctgagactttgctgaagttgcttatcagcttaaggagatttggggctgagacgatggggctttctagatatacaatcatgtcatctgcaaacagggacaatttgacttcctcttatcctaatttttttttgagacggagtcttgctctgtcacccaggctggagtgcagtggcgcgatcgtggctcactgcaacctccacctcccaggttcaggcgattctcctgcatcagcctcccaagtagctgggactacaggggcccaccaccaagcccagctaattttttgtatttttagtagagacggggtttcaccctgttagccaggatgatctcgatctcctgacctcgtgatccacctgtctcggcctcccaaagtgctgggattacaggtgtgagccaccgcgcccggccagagaacatatttttaactatatacattattgagcaggtacagctatgcaggcatcagttggtcaaaaaagtgttattgggcaatgcctgcagttccttgccttttgcctgattcagggcaatttattatttatttctgtatttaatgaacatctctggagcacacatacacatatgtctcatatatatgtatttactaatttaagcagtgtaacaactctgtgaggtgttgactgtaatcaccaccattttacagaaggagaaattgaaattaacatgtgtccaaggtgacaaaagtagtaagtggtagagccaagatttgagctctgataaccttgcaccaaagtctacattcttaagcaccattctgtgctaatttgtttagcatgggtgcagcttgctttgctgcctcattttttcccaaggcaaaagagcccttgatttcttgactgacacagcaccattttgtccccacctttctcaccatgtgcttcagtgagtctgttaacagctcctcttgatcctattgttatttacccttatgttgcgatatttactaccttttcgaagttgttgtctcatgagacccatttatattgcaaacacttcccttctggagctagaactagtgtcatcacatgctttttatagttcccttcctagatggctaaagtctgggagatagcacagtcatcctgaccccatgcaactgttccttgtccttccttctcatgcatatgtagctgggaattgctcagactgcaatatcaataggcaattctcacctgctatgtaaactcctaaatgcctcatgctgtgaaggtgatcagttaagttcaaatcaaaatttgattggaccattttaaaatactgtttttaaaaatcaggtactttcatacttaacattgatgtatgtattctttctaaagcaaattaaaatttgatcaaacaattacattctgaataagattcaaattaagtcagaaatacccagtcaaacccaatgactaaatgattaatttcaaaaaataattctctgtcccatcccaaacctattttcttatgactcatttcttctcattggctgtgtcatcaaagaacaaagtaaagtgaaatttggcagttggccagttaattaaagacttggcccaagtatttgggccacaaaattactttgtaatcccaattttctgttttgactttttatgattcaaatgaatggaataattgccacattttcactttactgtgagttttatagacctagcagcattatctgcaggatggcaaatgtctgaactaaaagttagcatttaaagaaatccatttggatgttttcaggtttttacacattcggatctgaataggctcagttaagatgtgaacaagggatatctattatttcatgggattcttctgaaattgatcctcttaagagcattcatctcagaccccacagccccaaggccagatcatttaatacataatgaaggagagaaaaatgtgaacagcatgacattttctcaaactactcatgttttaccaaaagaaaaggtagaaaaggcattgtaaagttttccctatttctatgtgtggtaacatagagactaaatacttctttcagtctccagcagcaaaaatagcaacctattaagatcagcacccacactggttagctctggtgaggagaacttgtactaatgaggccctggtcagggatttaatgcccatgggatccaattagcttcacacaggatgagactctgagcccagtcaggatgtaggctcatcccagctgcttctgctaatgcccatgctctttttcacacaggacatcactgcccaggcctcatcatctgacttggcagcagcctcctaactagtctgcctgcctctctcctggtcagtcgttcacgtgtactgtgggaggtacacattctcctctaggctttaaaggccatggttatacaactcacccttttcttctgatcactccactctcccagtgtttcctaatacagatttggtacttgatttggccagtgtcatctctgcacccacatgcatcaggaaaaacaacccagccctatgtctgctccgactgttccccagccttcctgctacaacacccagtcaagttcttgctccttcataacactgccatcaaccataccagtctgcactaatggttccccaaactccaacaatacttagtctctttcatacacaacatacagttttgccatgctccctattgtcccctctgcataagtctcatctccatgattgtgttgtaacttgactgtatgccctgtggcttgtgcttctcctccatccctaatcctggtccggtaagtttcacaaagttggtgcttaacacaaaggttttggctaaataatcaaaggagtgctacattagaacaagtagctctatcctgctaccacaccacaaccaccagggaagaaaactcagagcatttatcaccagctaccctcctctcaagagattttttatttatttttttgtaatacaaagaatactacattaccgttccacaaaatgagagcaactccaagaaaccttaacatgctcatcattcttaaatctgtaatacagttggtgagcagtacattttttagagcaagtttttttggaattatttaattatgcataataatttttgaccactattgtttaataaaacagggcagtgtggaagaattcgctatttgggaattaaaagagattatttattttaaaaaatgaaaaatttgaaatgtagattatttcagagctattacacatttatcattttagacattttctaaatgaagggtatttccagtatggatccaaatctattttagtcaatttgatatgaacaattgtcataaaaatagttacttcacaaaggaatgccattattggaagtttttcttaagtttaccaatgatcactctgcaactgattttactgttaagttgacttagcaacccttttaccacaaaagtttcaaagataatatgattagggtctacatttatatgatcatattaatgaatcatgagaacatatttatttgtacatacgtttttcactgcatttttccacagtcatggtctatttctactcaatcaaatgtttttgacagatacattaccacaaagcaagattcttgagttttcagaaagaaattagttggtttaattgctgcttataaagttgccattgtgactgggttactggtagactaaactaaaagtatctcaaaggaaggggtcatatccaaatttatgggagaaacatctaacatccaacacagtacagagtgcctgatacatacttggtactcttaaactgggcagagcaaagttaaagcataaaattacattttaatataatatctcacggcattaaaatcatagctgtatgataactgttaacaaagtctgtttggggaactgaagatgttaggaacagagaggaagctgacatcagatgtttctcttctcagcatctggaaggcgatagatttgagctctgagtttcaggtctccctaaattatccatgcccagcattgtgtaaatctaacagaaaaataaaataaaaaaaagcctatgagttataaatttcaaagaaagagctttatagaagccttgagaatgctgctttttttttttttttttttaacaaaatcgtaaaatcctcagcagctgcctcccagcaccactgcttagatgtctcctgtttgggtacagctcccctgatggccaaaattggcctaggtggtcctgcctcatgcttccatatggctctgtgctcaacgcaggcaaagcatgttgaaatgggctgtgtatatccagctaagctcacagagggcacaggctgtgtcccgttcattatcatatctcaaatgcttgacccagtgcctggtatagaataactgagtgaatgaatactgctttttttggtgggaataaatatatgaagacaaatacagtaatatatatatatatttttaatgggagtagtagcctaccaacaaatttggtcttgaatttgctttttttttttttcgagacagacagagtctcgctctgtctcccaggctagagtgcagtagcgcgatctccgctcactgcaagctctgcctcctggattcacgccattctcctgcctcagcctctcaactagctgagaatacaggcacctgccaccacgcccagctaatttttttgtatttttagtagagatggggtttcactgtgttagccaggatggtctcgatctcctgacctcgtgatctgcctgccttggcctcccaaagtgatgggattacaggcgtgagccaccgtgcctggccgaattagcattttataataattatccaaaaatcgtctacccgtcggtaatagcctaagcatataaagacttcctgcaagaagataataaaaaaaaatacaaagactccacaagctacatgaacaaaggatttaattaagcaattcacagaagagaaattacaaatggcaaacaaatatgaataaaaattcttctacctcagtagtcactttttaaaactgtacctaaataatgagatacaatttagtataaaaccttgtatggagtgaaatggaccatcacatttacttcagtgaaaatctgtcatacctttatacactcatacatatgcacacacacatgcacacaccccaaacttaggccttttcacccaagaattctaatctcaggaaatagaaatgtgattggctatttgtgtacagggagattattgtttcactgttatgtgtcacagcaatgtattggaagcaccttaatatttaacagcagagaaatggtcaagtaactcatctatataatagacaattaatgaagctattacacagcataagaatatgctcacaatgcagttaagggaaaaaagcaagatgcaaaactgaatatacactatgcttccatatataaaaaggaaaaaaaaaactgaatatgcagtatgcttctatagatagatacaaaagaaaaaaaccccagcaactctcattctattgtttctgtgagtttgatgtttgtagattccacgcataagtgagatcatgtacaatagtaaaatatagttgagtatctcctggtgcagagattatgtgtgttccttccttattttttcccttttaatatttttcaagactttttacaatgagcacagaaaaaaatgtttgtaagaaagctttctttgaagattcaccatccagagctagtattttcaatgtgatgaacaagagttcatcctgtacacatccagtagctggtcaggaactctacagaggaaggcatgactgtcatcttctgttgaccccttcctctcaaggtcttgtaagtgctctttttacttccttgcactggggacgggactatgcttgtgtctaccaatggcaagattttgtcccccctagctttactgaggtatgattgacaaataaaaagtatatctatttacagtgtataacatgatgttttgatatatgtatacactgtgaaatgattactaaaatcaagttaatcaatatatccatcacctcacatagttatcatttttttctgatgacatttaagatctactatcttcgcaattttcaagtatacctcgttatgatctgtactcaccatggtgtacagtagatttccaaaagttactcatgctgtccaagtgaaactgtaacctttgaccaacatcttcccattctctctccttcctagatcccctggcaactatcattctactctctgtttctatgagttcggtatttgtagattccacctataagtgagatcatgtagtatttgtctttttgagagagagatatatcacattttctttatccattcattcttcagtggacacacacttaggttgattccatattgtggctactgtgaatagtgctgcactgagcatgggagtacagctacctcttcaatgtactgatttcatttcctttggatatatatccagaagtggaatctctggatcctatgataattctatttttagtcttttgcggaaccttcatactgttttccgtactggctgtactattttacattctcaccaacagggtacaagggttccctcttctctgcatcctcaccaacactcattatcttttgtcttttgaaaacagccattctaataggtatgaggtcatatctcattgtggtttggtggggtttttaaatttatgtttttattttttgagacatggtctcactctgttgcccaggctggagtgcagtggcgtgatcatggctcactgaagccttgacctcctggggtcaagtgaccctcccacctcagcctctcatgtaagtgggaggacaggcacatgccactatgcccagctaatttttttgtggagatgggatctcactatgttgcccaggctggtcttgaactcctggcctcaagtgatcctcccacctgagccttccaaagtgctggggttataggtgacagccactgtgcctggctcattgtggttttaatttgcatttccctgatgattagtgatgctgatcatttttttcatattcctattggctatctgcatgtctccttttaagaaatgtctattcaggtcctttccccatttttaattgggttattcgttttcttgctattgagctgttttgagttccttacatattttgggtattaaaccttatcagatatgtgatctgcaaaactggcaaggtctggagagtgtaaccagtgtgctctgtcactcacacagcaaccctgatctccggagaactgagcccatcttggagagccccttgcagaggaccagcagtggcagttcctccagctccagcacccctagctcccagcccagctcccaaggaggctcccagcctggatcacaagcaggatccagtgaacgcaccagagttcgaggtaaaactttctcttacctttacctggcaatactgcctgggaggaaagctgtggacagggaaaaaggttagttacttcctgactctagtccaggcatggccaccactgtgtgatcctgaagagcctgtcaactgctctcaaccccagtctcctcgggagtgggccactgtccctaattgtgtgtgtgccatcagtatggacaaaatcctttctaatctcagataccagtgttttccagggagatcaccaaatatcagtcttatttgaaaatacagtcacttaccagtcacctgaatttctgtttctgtttgattgccggtttttagagtttcatgtacccacaaatgtcctgaacgcattgcaccaattgtcctgtttagtattctgaacatagttcatatacacagttcagaataccatgtatttctcaaaatgaaattcagtaaagactaatgtagaatacacttgaaggaaggaataaaatctttgacttaaaaagcatatttaggccgagtgtggtggctcacgcctgtaatcccagcacttagggaggccaaggcaggcagatcacctaaggtcgggagttccaagatcagcctgactaacatggagaaaccccatcgctactaaaaatacaaaaaattagcctggcgtggtggtgcatgcctgtaatcccagctactcgggaggctgaggcaggagaatcgcttgaacccaggaggcagaggttgtggtgagccaagatcacgccattgtactccagccttggcaacaagaatgaaactccatcaaaaaaaaaaaaaattgttgactcctctggttattcctattaagtaaaaattagcctctctaaatatttaattcaaattattcatcattgtttagtttccagtaatggggaggcctatgaaaaacattattatttccaggtgctgatacataataatacattgtttctagctagttaaaattcactccttctgaatcaacttcttcagaagataattttgcttctaagtgatgaagaccagtactttaattgcaatttgacaaatattaacatacttataagtttctctgtctgatgaaagcctcatgagaaccttcagttcttttttctttcttagactctttattacataccacctcctaatacccttagtttatctcctaacaccctttcagggttttaaataaatcactctatttccattttaaaaagcttgatatctaacatgtgattgatgttcacgtctctggattgggatatggactagccaacagctgcctctatatgcattcttctgattagtggcacatctcagaagtatctactgtatgtctttgttgccttgatcgaaatataaatttccttaatttagaaaactaccagatgtagtggcttacgcctgtagtcctaggtacccggaaggccgaggtagaagaattgcttaagctcaggagttcaaggctgcagtgagctatgatggccccactgcgctccagcctaggtgacagagccccatctctaaaacacctaaagaaagaaaacagccattctgttatcttttttctatttataggcaacttcatattcttagagcaaatatttaaataaaccaaacttaaacgcataccattttaattctctggtctggttcaggcttactttttatttccttcagcccctcgttcttccggattaaaagggctgttgtatccctggtatgtccctgtccaagaaagactactttttaagaaataaaaaccacctctcctaccctaaattgcatcttctctatctgtaagctcatagactgcaaagatgctattcactctgcagctgtcagggtccccttgaccttgctctgtacctccagcctagggcccttctcctataacaacccccttcttgccctcacctcattcttttatttttaaagggctgagaccactcccatctccaattaaaaaccgttccaccaaataaaataaattttttttccctcacaaaatttcaacaaaataacctatcctgattggacaaatgataaaagaagaaaacaagcatagaaccttagaggctcatttagcatagtgactgagaataggactttcagaaatcagaactccagctctgtctataatttcagtgtgacctccggacagttgtgtcatctttgtaaatctgtgttctgtaaaataggagaatagtgccatatcattgggttggagtgaggattaaatgagataattgacatggaaagcatttagcactatgcctgacacataagaagtgctctagtggtgatagtacttgctacatttcttttttttttaattgttactagtgatttccaggtcacaagcctaaatgtgtttgcctgaacattatatttttcatggatgtttcttgaggatttgcccaggtgaatgacgtgtccactgagtaatctcaatgtgatgacacatcacagataattcattcagaacttgagccagcactttttgatggccatctctttcttggtcctctgtttttttcctctagccaacagtaagtcagaaggatcacctgtgctcccccatgagcctgcgaaggtgaaaccagaagaatccagggacattacccggcccagtcgaccagctgtgagtgcttttctctccaagagttttgaactcttaatttaccagagaacccacaggattaagtagttggggatacactcatgatgcaaacaaaaattgttgagattagtaagaacggatgctagaaacatcccgaagaaagtcatacctgattaggaaagaaccgaagagatcttggattgactcctctgcctttggctatttgctgatcattagcagtcctttaactataaaacaggaagagaaacaactcctatcattccataatttctactcagcaactttggcaaaaagatgttgaaagtagcagttaaagagacttgggtactttctatgaacttctctaatctcttctactctttccccatattattttccacatgaattaatattacagtttttctgctatttttcatgcctccaggactatattttctggaccaaactttttaagcagggtccaacaggcgtcgtaacaacttagcatccagcttcactgctgtaacatgatagacccccaggtagccttaaagaggagtatggaggctaaaatttgaaagttgaaaattaatttgggatgaattactatccattttttctatttaaatctcttgagaatcttttctgtaaaatgaacgtgaagctttttggtttactcttttttaacatcttaaagtaacgacgtataccgagagtaataatgaagggatttgcatcattctggattgacattctcttcgcccttttgtatttatcagttgcgtactaacaattacaattttgtgtctaatctgctgcctttctgctggcttttcctccttctgtggattcttctggattgggttcctctcatttcagagctacaaaaaagctatagatgaggttagtattaccttttcttggtcatgctttcacaaaatgtaaatattaaacttatttcctaatgttgacattcagaaaggtggccaatgggagcaatcagctgggaggagatttgtagcaatctgctgggaggagtgccccttcaaatggaagccaactttaagaccctcaaacctacccatatagcttcagagaccttccttctaagctaaaatgtcacttttccaatgttccagtctggctaatgacaagtattcatgctttattaatggcagtttctccttccagtatcttccaatagcaaacctgtacttgccagccttgctagggaatggctctcagcagttttactaacaagaaaagagacatcattctaggacactccaaatttagagtgtgtgatttgtgaacaaggagttagtaggtattgttagattaattttgtgggacattaacaacagcatcagaagcaacatcagctttagttaatgaatcctggaaagttaagtgactttatttccttgtctgtggagacgttttccattagaaaaatatatggctttgtcagttgtaggtagcttgctaagaaggatgactgccttactgctatttgtcagacctgcatgaatacagcagagtagaatttgtttttttaagatccaggccttgcaaagagtcctaaatgcatggaatctaaagactaccatcatggctttaaagctgtagctctgctgagcactacttttgtgaaatttaatggaaaaagcactggctttgaggtcagcaagctgcattcaaatcttggctcccccagtaaataactggctgagactagtctcataacctcactgggccagagtttcctcatccataaaatgagaataaaaacacctccccatcccacttacaagattgtttaggatcatttaaggtaatgtgtgtgaaagcattttatgtgtaacattgctgcagaaagccaagggtttgattaaggtttgggccagaggcatggagctattttggcaggtaggagaagcatgtttccatgtatctggtcttcaccgaagagcctcactttttcagacttatggccacctcaccacccagagtgacgagacagttatgatcatagttgaaggattgttgcttataaaagaatgagactccgcatgtttgcggtgtgtggatggcatttatagaaagggaagaggagagtgtgtttttaattgctctgtgccgtggccttgcttgcccctctctctcataatagtgagaagggcagggattatcacaacttttgtcagttttctcccagaacaggtaaagaaagacagtgaagttctggtgctacagttgccaataaaatggctgtgcatgtgcagaactcaagaggaattacatgagttcagaaattggcttggaggggccgtcattaaggaaaaggctctcacagatttcatctgattaacccagaatattttaggctttgaaaaattgctctacttttttttggtgtactgcaccacactggacagagatgagagggggcaatggaggtatacgtaattacaaataattgagggggtgtgagctgcatactaaaatctctggagccatgtatggttggaaaagccctccaggtgactatcctgatctcttgagtatcactgatccaaaccactaaaataaagcggttctacctaacccagtggctctcaaccacggctgattcctccactcctcttcccttaggagacatttggcaaaatctggagacagttttggttgtcaccacttcagagtagcaggcagtggtactggcatcttgtggatagagcagaggggtgctgctgccaaacatcccgtggtgcacagagaactccctacaataaagaattatctggcccaaaatgtcaacagggccataattgagaaactttgaactacacctttctcccttctccattcataggttttggtagggcttccctctcaacgactgtttttgcaatttagataactgggattgaaatgaaaaatctgaaaatcacttttgaaatattgtcgcttgttattgctaatgatttaactttttataaaaattaatttgggggagtgtacattaatgtgacattgctttctaatggaatatgagattttgcagcatagtctatttaatatagtctttgaatatagtctttgaaaataaatgggttttctctgttggcacaattaaatatgtgacacaaagattatacacgtaagaaaacactgtttttaccgctgttttttattagtatgtgggcatcaaaaatttcaaagcacatcaatttagattggatggaaggtgaacaataactaggggttcaacccccttttccctcagatgaggatattgaaactaagtggcttgcccaatgtcatatctttagagttcctaaaaagaaaatagtttaatacaaagagaaaaaaaagctaaaaatttttaaacaatagttcaaaaattgaactaatatttatttgaataaactatattgtttctaaaaagggacctaaaagagcgcctttttagtcaagatgtgcataatagttaacctttgttgaatgaaaaattatatctagttgattctaaaaactgttaagcctcgtagctatcttcacatttactctgtagtcaaaaaatcttaccatcttgccatatttcttttttagctatatattctcaaatattttcatgctaaatagcacttattttgttttttaaatactttttagctccaggcttgtgacagccaagtaataaattaccaagaaggctcattatatggagaaaatttgtattgtcaaagaataaaatatatgaaaatagaattgaacccaatggtgttaatattagattgtgtttatttcctataactttgctattataaatttttcaatactggacggataagaaacaaaacttcagctaaacacataggttcttagcaatggaagattaattttctttgactacaggtattactttggaattattcattatttttaccttttcatagggattctggtatatgtctcgcctccaaactgttaattgaaaatttcctttaagtttaattgttatttctaatgtttcagggcagagagctttttagtaacacagaagcaaaaaattctaattaaaagcaaaattattaagcagttcagaactttaaagtgtttctaaatacaatgtttagaaaaatgtatgtcattttaacaagtgaaagtttttttaaatcagtagcctgtggactaaatatttctaaaataattttgattttttagaatttcttttgtctcgttttgaaatgtcagagaaaaggaaaataaacctctggggaaaatgtatcattaattaaaccatagccaagagtattatattttactcagaattattaacaatagagataaactcttttaaaccatattctctctttaaattatataaaatgtaattcttaataacaagtaacattttaaatgctagctgtattctttgatgagacttaacacagtcctaatatatagatgtcagaatacaaaataaatttatctaatttttcattatttcactggtttggaggatgataatatccttttctttcatagccttaacaaatatctagactttattttcccatggtactcaagaatagcatacccttcactttcttcttcatttgataaagataagcattgacaattgccaggaggaaataagaagtaaaagttgaaattcagatattagcttttcctattttggctaattgccaaagaaaccagaaatttgcataacattatacctatgttatggttttcctcttctttttataatatgcattacatttaaacagagttggccttctaaatacaattctattttcactttcacagatggagcaaatacattcaccgagattgaggcatgtgcaaatgtgcaaatgtgcatgtgtgcaaaagccctagccaagtgtgtttctgtatgtaatgcaaaggttgaatttttagcagcttccatattctaagggtttcaaatcaggtgtcatcaagacaaatttaaaagccattttgctttccctttgatttctatgaaattagaaagaaatgacccttcagttaacactatgaattgcctaaatttctagaccacgtaaaacacctaaagtgtttcctttcctagtgtgaaccaaaatagtaatgcctgacatacaggtggcagtagagaaacaatgttttgttgtattctcaaaataaaattataatttaactatacacatttatcacagcttttcttttaaccgattaggatggattacccaatgtcatcacccaggttgctctaatcctacatcaggtgaattggatgcatacatttctggattgaaataaagagagaatatggccatagaaaactgtgggatttagtatttttcaatgagtttctttctccctaatcccctgtctctcactgaatgctctgattcccacatgggtcactaatatagggagaaatggtaagactgatgtcaaattgctttttccccatttgcatgctgtgtgccatgggcagtttaacccatgcaaattagagcggccatgcttttgcagaactgcttccctctgcattactctgaaagcatgtaaaataaaaggtagtcggatattcagcacactgcctgcagtatgcctggtgattaaataccacatcatcacatccataaggctaaaggtttcatcatactcatggaaaactcaaaattatctcttccttttggtatttgcacattcattttagtgttcttcaccaggatttctgccagatgactggaatttaaaacaaaagaaaatgaaacacctatcattttggaagagaactcttgttgttgttgttcctcttgattaattcagttctgtggctgtaaatttcagtggcactagactttaggatgggccatgatttgatgtggtacctccattctccagggaatgatgacacaccaaatgagtcactgtagtagctggaaccttgggagttgctctgttctatggctgactgatggtaaatttcagtacagcagcaatcataagaggggaaaagccatcactgtggcttgggcaggagtcccagaatactggggcacaatttctaatcccacatattttcccattaactctgggggtgaccagcttcacctttccaaaacaaaatgagaacccaatgtttgtatatatgtgtacatacacatatgtacacatatatattcaggactgaacagtctcagtctagctattggttttgaaaaagtttaaattgatttcatctttcttttctagcttctacacgctacaaacatcattttcttagttccatgcagtaactatgtttgtcacagttctatatagagcttttttttttcttgttgcttaagctggagcactgacttgctgagagatgtagctttggtcgtatctaccactcatatgctgaacaaatttttctttcataggatctgacggcattagccaaagaactaagagaactccggattgaagaaacaaaccgcccaatgaagaaggtgactgattactcctcctccagtgaggagtcagaaagtagcgaggaagaggaggaagatggagagagcgagacccatgatgggacagtggctgtcagcgacatacccagactgatgtaagagaactacttttaaagtgtagaccgggaggggactaggtttccaaaataaaaggacaaaaaaatatgagttaaatgtaagattgtatatgggtctgtggcaagataaattgactttcgggacttgggtttttgttggagcatagttctataattatctctatctatggacacaatcacttagaatatgtagcatttttggactgcatacactttacctatccattgccaatggattgactatcctttcggcgactctttcttgttcttttcatcttaagggcaaacaatatcgacaaccagaccattgatacgtgccttcccctctaaaactgaaacactgaaatcatgggcaatgacatttagggattaaaattaacaacataaaacatgtatttcattaccaccactgccaccaacaagcaaggagaaatgcacaagccagcatgcgttaccatcccagcaaaagaatcaggactcagataatcatgcagagaaagttccaaaatataccccgttatgattttctactttattcccttcatggcttctttttctggatccatttttctgtggtctgtgtctttgccacatactgtcagtctctttgcagttctctttttatgtatttacatgtatatttatatgtacctacattttctttagtaattgtagcctttttcttttttttttttttttcaaggtgaggagaaagttcattttttttttttcttattggagtggatcccgtgaaagaacctacccttatcccctgttgcttccccagttcctccacctagtaagcacaaggtgtttgtgccctggtctcctacaactttgatagaatgagatgctaatttttccatcttcacacttcaatcacctctatttctttggctcagctactagcattgattatcagttcacactcactctatataaaaaagaagccatttcaggccacaaattattgtccacttcagcagggactggagaggcagggctggccagtctaaagggaatgtcattcactgattaacatcattacatacaagcgattctaagaggcaaatctaattaacgtagctgaaaaatccatactggttattttgctgttgatgacccagttgctgacagctctaaatatgctaaaatatgacattttgaaacaaattgcattaaattgcctttttaaaagtaaataaaattgttctagaggcaaaatcactaatccagaacatttctgcaaaacatgctggcccttttagtttttgtcttgactcagaattgcttaattcttctgacagatgttttgaactccttttaagcactgagcatgcaagcatcaggatgagagaagattatgaaattaaaaggttgctaaaactctcactatgtgatagccctgctgaaggctttaagagatctgataagttcgtacttggattttgtcttccaaaagtttatatgctagttggagaatgacaaaattacacatggaaaactgcaggctaatataaacatttggaggaacaaccaaagatgttcattagcatttgggttttaggtcccctatcatattttgcaaggctattaatggtgttcaccctcctacctttaaaggcaaatctaggacttactccccactgtagaaacacccacctttctaaaatttcctgaatagaccacgcttcacttctgtctggcatttcctgttcctttagaaatcacctactcacagccccgcctgcataggtagagcctgccccctcttctgtgctaccgctgtatgttgtgtgtattcctgcatcttcatgtagtgccttgaatcaggattgtttgttaggtctttgtctccttttctggactatgatatctttcagggtaagggttatgccttactcatctctcttgctcttaacacgttccatggtgtctggaatacagtgggtcttcagtgactataatttacatttaattgcactgaatttgaaattgcaagttctgactttgaagagtgtatagccaattctatacaaataactgtcagcaagattaaaaaaaaaaaaatcctgaggtaatattagaatcccaagcagggggaagagttgaagtaaagacacagaaagttgactttggtgggaatgtatggtgtatacggtggaggggagtctggactagtgaaatcagaccaagaagtgtgctctttatatgtagccattggaaaccattgaacgtatcttgagttcagtgttatatttgagggagattatttcagcaagacgatttgaaaagggaacagactggagactggtaaagcaattcagaggcgctattactataatctgcataagaaataatgaactgaggctatcatggaatgctgatggtggaggcaagacttgacatggttcttaagggattggtaaactttagatagatggaaatgattgtttaagaacatttaaaatatgtgattatgtatgtgagaaaataagggtacgaagggtacaaatgtatgtgtgtatgtttacttcaatttgtaaatatatgtatttttatattgcatataaaatatacacagtctgttctacaatgtgatgattgcatgcctgagaaatttcatactattaaaagttcattataaaacaatatttaggaattgagtatttgggggccagagtgccttttatatacattcttattacctttattttttgttaaggtaaacctctatattttgtgccatatatttttaaagcagaaaacaaaaatatattgtagctcagtgcccaccatgaagtaaacacagagaagcttctcagaaatggagcaccagccattttgacaaacagctgtggtttctgatgtttaaaacaatagcttttttctatgcactgtgctggttttgcatttattttacaagatataacttatgagagtgcacttaactaagtttgtattccccaactaaccagttgcagtatttcccaattcctcatgcatagaaaaataacgagtggagggaaatacaccaaaattataaaagtgattacctctgggtaatataattatgggagatttttattttatgtatatccccaattatatgatgggcatgtactactttataatcaggaaaaaaataaaagctttatagaataaaaagaatggaaggaaaggcatttaatttgatttgcatcacatcaagcaagccaaagaggcaaccttaggtattagtgtcttccctcaaataccagcaaatgctccagtagggaagatttctccactgtaaaatgactcttttatttccgcttttttctatgctatacctttggaaggaagccactatgcacagcccacacttgaggagtggggaatcatgcgttccctcctgtagggtagaatagctacataatttatttagaattcttctgcacagatttgtctcctctatttattaatttattccatcatttatatcagtatagattcatggatataatctttattttgttgctcaaattttccagttttgaccttgggagctctttcagttagctcctgtgcctctttgactgacatgcctccacctccccttgcttgtttgtaaattcccattccaacagtcagaaacctggcttctgccatcaactactgtattagtccattttcgtactgctatgaagaaatacctgagagtgtataaagttataaagaaaaagaggtttaatggactcacagttccacatggctaggggggcctcacaatcatggtggaaggtgaatgaggagcaaaggcatgtcttacatggcagcaggcaagagagcatgtgcaggggaactgccctttataaaaccatcagatgtcctgagatttattcactatcacaagaacagcagaggaaaaacccacctccatgattcaattacctcccaccgggtcactcccatgtcgtgggattatggaagttacaattcaagatgagatttgggtagggacatggccacaccatatcaaccacccatttacttaattgtgcacatccagtatttttgtatagtagtatcaaatttgttaacctgtaacctcatgggaaacaactttctcaactagaatgtacactgtttattgctcagttcctcttgcctttagtattacagactccactcatttccaaggttacttagatcaatgcctttttgccacatttctcctcactgaagttgttcatacatttgtaatatggtgagattctcttatcacagtttttaacattctttcctgggagcttctgatctcctcaatgattttttaaaatttatatacattaagtttaactctttttcctgtaaagttctatgatatatctgaatagattttttgttattctatgataaccacccaattataagaaaattattttggcacatcctagtaaacccaacttcataaaattgtaaaacttaacattgattgctcaagatattttaaatatccaaataatatcctgatagccaattacttatcaattcacagaagagctatatttttacaataaatctgaatgaaatctctgttagacattaaacaaagcccttgacccaagatcttcagcgatttaataaacatttattatgtgctacctgcattccaggcaccatgcttggcactgaaaataccaacattaatgagatctgatcattgcaggactgtgtattgaatgcagtggtagagatgcacaaagggcaatgtggaggcagagtgaagagccacctaaaccattccagtgaggcttaaagaatgagttagccagagggaggcagagaatagaaaagaatcttccaggtaaagagggcaggctaaagtcaccagggattttctagcataatgtacataggaaacttttataagttaaatgctggtagagttaggagttggggcaggattttgttaaaaaaaattaggttagtgagacaggcaagaactagataatggagagcttgtaagccacagtaaggagcttcaagtttatcctgtggttgacagggagctactgaagattgaaagtagaagagtgattcggacttggtcagatttgtgttttggagggctcactttcacagctgtgaggagtggatatgagggggaaaggactgaagacggggtggccaccaagaaaactgttattcaggtaacagaggaagcaggtctgactaggacaggagaacttgattgtacaagcatcagcctggcagatgccaccaggccaactgagcccctgacaatagcaaagaacccctttctgataaataagaaaagtggctgccctcatggaagactcttgataagtacttcattgatttattggctttatatcattttgtcccaaacaagtacttacggcacaaaggaagaaagaagagcaagaaaaaaaaatggaagatacacacaagataaacaaatgagtgaagaaatgatattttgaaaactgatttaccaatctatcaaaatgccaggaattcaatttttttttccatgtctctgaacactattaaaagctcctttctaggaatgacatgttgaaaatgaaaatgcctctttggaatttcttcccaaacacatcagttctagcccacatttagattcattcaatccactgctccagtttagtaattgcaatggaagcttcttactatacattttctcgtctggactccccctgtcattttttcacctgtctgttttggataaaaatccttgaaatatgtctttctctgccccagagacatcataaatctggtgtatttcttgtttcttagatggaagtttccagtaattctttggactttcataagatccaagaggccagagatatttttaaatatataagaaacaatgaaaataaaagaaaaaaatgattaaagttgcaattaatatgcctagagagaaataagccttgataactttcctatttttagaaaacccactttaaaagagaggcagatgctaaaataggagaacaacaagtatcgcattaacaaccaaaatccttcttccagaagccatgttgtaccaacctcaacctgtggtgtgtggttctcaaatcccctgagctcctaaaccagagaaattctgtgtcatgcaaatgaggcactcctgatagagtgaagctcactatgagcagtcagtcatcactttttgagccctggcactgtgctctgtgctacaggacacaggaaacatcagtctgtgttctcaaggagtatgctgagatcctgttaccttctctcattatactgtaaacatgatagcaagaaaagaactgaaaataaatataccaccatgcaggatgattacagaggctgagtgctgtttaagttaaacctcctagtttatggatgccccaataagccagaatgttcttagtagatatttcttctttatagaagcataaagcccatggatctaataatcattttttgcattcctagtatgtgacaactctaggctgggtactgggtaataataatgaacaaagagacaaggactctgccatcacaagcaatgagagggaaggagaaagggagaattcaaaagataagataattgcaaattgtgatgagaactatgaaggaaaaagggtgaagagaaaagaagaggggctgttgggacaagacataggtgataagagcagacttctcacagaaagcatcatgtaggatgaatgagagggaaccaaccaaggccagagtggaaagaactttccaggcagagggaacagcatgtgtaaaagcaggtcaggttgtctgctgcccaaagaaggagggcaggggtcaggggagatcatgcagagcctggtgactcctggtgccaacttcagtgttttttccaggtaaagccaaacacttgctcagtctggctactgggcagagaataggtcaagaggggatgctgcaaaagtggggccagtccagacatcaacacacattaaaattaatatgagattggcagggcgcggtggctcacgcctataatcccagcactttgggaggccaagacgggcaaatcacgaggtcaggagatcgagaccatcctggctaacatgttgaaaccccgtctctactaaaaatacaaaaaaaattagctgggcgtggtggtgggcgcctgtagtcccagctactcgggaggctgaggcaggagaatggcgtgaacctgggaggcagagcttgcagtgagtcaagatcgcgccactgcactccagcctgggcgacaaggcgagactccttctcaaaaaaaaaaaaattaatatgagatgtacttaagaccactgacatgtacacttaaaattggtacaatggtaaattttatgttattaatatgtatattttaccataacaaaaataatgaatatggacaggaaacagatatttcctaaagatacattgccatgaatgttgttccttctcatctcagaccaacaggagctccaggcagcaacgagcagtacaatgtgggaatggtggggacgcatgggctggagacctctcatgcggacagtttcagcggcagtatttcaagagaaggaaccttgatgattagagaggtaagttggtataaaaactgtgtagaggaaatgccatttcttcagtggtttttacattaaagctttcacagagaatgcctatggcatgtattttaagtatggggaattcttgggggagggaggacctgtgcttccaaatagttgagtgattttaattgtctgctgccttctttcctgtattcttctaagctctggcagtgtgacttaattatattattccaaattcttcagcaggagctatgcaaatcagaatatagaatttgggcctgaggatataaaattgcaaacttagatgtttcctacaacaggaaaacagaaatgaatggtctctctgaatagcatcactggccttgttatgtctcttctccccatggttttatcttagtggatttcgtataaaaaatgctcaatagttccaagaaatgatgatatcatcttatcttgttaaattaacattaaaacaaccgttaagttattttattgaaataacaaagaaataggcagatctacttcaaaaatgtaccttggaactttggttgaatttttttttaaactctaggaacatcatttcatttggggggtggcacatgttccctttcatctgtccttctgacatgcagtaactccccactgtgtccatgctaaccagaaagaccctgacaaattgaaatccgtcttttcctctttttcacttcatcatcaccatgcaagtttgagtgcagatatttacttggaaggaaagaaatggctgagaacattgggcaaatgttacctgacctctccctgcatccatctataaaattttataaataatagcatacaacttataagatggttgagaatattgagttagtaaattaagcattcaataaatgttaactattttatttcactctctcctcggaaatgaattctccttttacttgttatcaccatccagtcctccctctgaaacataaacatatgtcatctgtttttcctcttcagccaggacagagttgggaaactctaatagcagactttgctctccaaaaaggcaaagggcatctcactttcgtaagaaagaaaggaactgtagttttgagatgaataaggcctttgaaataataattagcagtggggctataactggaagactagttcacaaagcaacttgctagaatttcattttatgtccttgttgaatctttcaagtagcctttaaagagtcctttcacatatgcctgaaatgaaaaatggacttggctgctgaaattgacattgtgtagtgctggcatataaatctcttcatgtggttaatggataatttcaatggaagtgtagaaggcttctatccctataacttaccacttaggaaaacatgagggagaacgttctggagtgagttgctgtttgactccagataaaaggactccgatttctaatgtggcttaaaatttgcttgagtctttatgacagagtcaatacctccaagtagacatttggagccacattttcagttcattgccagccacatccaaatggctccatgttatttatagcactccagtattctatgaccacaacctgtcactttgaaaacagcatttgcagccgggcgcggtggctcgtgcctgtaatcccagcactttgggaggccgaggtgggaggatcacgagatcaggagatcgagaccatcctggctaacacagtgaaatcccgtctctactaaaaataaaaaaattagccaggcgtcgtggcgggcgcctgtagtcccagctactcaggaggctgaggcaggagaatggcgtgaacccgggaggcagaggttgcagtgagtggagatcgtgccactgcactccagcctgggcgacagaacgagactctgtcttaaaaaaaaaaaaagaaagaaagaaagaaagaaaatagcatttgccagtgtcttataggaatttgatctattaaggaacccaaaatatttttgtcctctcaatttccaattctgccttcctcaatgtgggttttttaaataacaaactgtattagttggggttctccagagaaagagagtatttacatatgtagagagagagagactgctttattattattattattatttttggagatggagtctcgctctgtcacccaggctggagtgcagtggtgcaatctcggctcactgcaacctccacctcctgggttcaggcgattcccctgcctcagcctcccaagtagctgagactacgggtgcacgcccagctaaatttttgtattttagtagagatggggtttcactgtgttgcccaggctggtctcaaactcctgagctcaggcaatctgcccgccttgacctcccaaaacgctaggattacaggcgtgagctaccacgcccggccgagagactgcttcattatgaggatgtagctcatatgatatggaggctgagaagtcccatgatctgccatatgcaagctggagacccagggaagctgttggtataaatcctagttggaagctgggtgaagatgagatgaaatgtcccacttcaaccagcggagaagaaaaagagggagaaaattccttcttcctctgccttttgttttgttcaggtccccagcagattagatgatgcccatcccacttggaaagggcaatctactttactgagtctaccaattaaatgctaattgcttccagaaacacttacagacataccagaaaaaatgtttaaccgaggcaccccatggtctagtcaagttgacacataaaattaaccatcatcaaaccttgagctgaaaattactaaaagtacatgtttaaacaagataaatgcaggttaaagtttatccctgacaaaataagaacataaaataaaaactcattataataagatttagcttatagggtgctattagtacagttctccaagatgaactttaggagaactcacccaacttgtcatcttgtggagtggactagatggttctataagaacataccactctaacactcatgatcctgtcagatgcacaaatttccccttgtagtgcatacccttatccctgtggttctacctatccctgtcctatagccccacaggaccactttttactcggttctagaatacaccacaccagctgtgagctgccatttgtccatggaagctcatctgctggaagaggtattttgtattatccactgctacccacacttcaccaaaagaaggtccctgttctcaatcttccttatctcctacaagcctctactgggactccatggacctttgtacacagcaccttcctggtatcttttcagcgttgatcctcctcactgaaccagaacactagcttgtcatcatgaaggctctttgggttacaagtaatgagtaaaagaacccacttaatacagagtaagcaaaaaaaaaaaaaagaaagaaagaaaagaaagaaaaaaaagaacattttttaagtcgggagagggtaggtatcagaaatagaggagtaaaggaagatttagggtatttcatggaaggaacccaaaggtaaaagtgagctgagcctctttgaaggactggaacagacaggagctcaggcagcttctcatgtgcaggtctctggctctcttgctgcctgtctctccttaccctaatctctgctttcttccacatttctcctttgctcttctctctctttgtagaggagctttctctccctctgcatgctcctgctttcacctctccacttcctccattgcaagatactcaccacatcccagttcaactgccagcagaaactgatccatgtctcttgggcttaatattaaattccagtgggaatctggtccctcttggctcaggcatccacccctgattcaatcagctgtgaccaggagtaggccccctaatacaacagtgcagcccagagcacctgggctctgccataggacagctgggttcaaaccacttagaacccgtgtcactcagggcaagataattgatggaatgtcatatataaagtgtttagcacagtacttggcatgtggtggtacacagaacatctttgtgccaatccccacgggaatggtgagagataaagacgagatattattgaggttctgttaatgaggttcttaaggctgttgtacatctgtctttgtgtttccagtacagtacttggcacacagaaagtgtttaataagaaggtgctggtggagtgaacaaaagggtgatgactcagaagtgggcagattcagagcatactactggattcctttaagcttctcactatctgagccacttccccttgttagcctctctgagtctctctttgataaccagtgtgtctgcatcagtttttggcttgagaaagagtgctgctgatacaagagaggccaaaaaattccaaagagatgacatgtgatttatgctaaagagaggtttggggaaaatgtttaaaagcttttcagtatttgaacagaagttaaaagaaaggagaaactgcccagtatacataaagtagcacacaataagatgtattaggactgaatttcctaaatgtcatttagaaaaggaaatgctcaactctgagaataggcactaatacacgctactgatggccactgtgacaaaatgaatccagaaaatgttcctctccaggacagctcgtagtccaggagcaggttgccaagaaacacaaaggacactaggctttccagttatctctcaagcttcctggaaacatcaattacatgcaccattacaggagcttgggagtctgtttcatctaaacaagaaaaaagaaaagaagtgcctcctttcacttccagccagaggcaggtgcagagagctgtaattgcaaatccatgacaagctccagaagtaaaaagctaggctggtgagatggtcaaagaaacagcatgaaaccttgcacatgccagtagaatgctttacacttagtaggaactaaaaaatactgtgttgatgaatgaatgaaagaaaaggcagagagggaaatcatcacttaatcagatctgctctaagaatcctcaatgagccagttgcataaaagttaaaaagtgcaacactagtcaggcctacaatgtgggcactggcttttggaaaccagagttgtcttttaatcttgcctttcctccctggggtttttttggcagagactgctctccagagcaatggcttccaaacttgttacatcacgtaatcctatcagtaaaaactgtacagcgtgtcacctaatacagtgtatttattcacaagtcatacatttttttctactgcactgacattatatacattataaaatacctttggccgggcatggtggttcacacgtgtcatcccagcactttgggaggccaaggtgggtggatcacaaggtcaggaattcgacaccagcctgaccaacatggtgaaaccccatctctactaaatacacaaaaattagccgggtgtggtagcacatgcctgtaatcccagctactcaggagactgaggcaggagaattgcttgaacctgggatgcagaggttgcagtgagccaagatcgcgccactgcactccagcctgggcaacagagtgaagagtccatctcaaaaaaaaaaaaaagaaaaacctttaaaggacattaaaaagggatattagaggtgatgtttcaaatgctttgctagttatgactttgttactgcctacatcacaaagcaccatagttatttattgagacataaacatttatgatagttgtaaatccatattttcaaatagtattctagatcatgtcaatatatttggaactcctgtcagatctgattaatcattgttttgaccttgtgaatgacaaagagccctgtgagttaagtatggtctctgccctttcttggagtactccacacacactgcttcttttcagcaacactttaggtcgtttatctgttgtgtgggtttgtttcattgtaacctggtaatatgatctgtaaatatatataagtggcaggtgcatacagcacaagtactacaaaagagtttacaagtgtgggccctgctcagtccctccctttttgtagcgtctccctctgtacatgggactcccatgccatatgtgaccactgtctgtacctcatgcaggaacgtaaggcttcaggctcaatccataaactaaatattggcaaagcttaatttcttttttgttttcttaagtaaaatagaaatgtgaatatcaccttctcatgccctagtgggttgatttggagccccgtatgcctatgctgtgtgagggctgatgtcactctgtggcctttttcccccctctctaactcctcccacgtgctgtgctccctcagacgtctggagagaagaagcgatctggccacagtgacagcaatggctttgctggccacatcaacctccctgacctggtgcagcagagccattctccagctggaaccccgactgagggactggggcgcgtctcaacccattcccaggagatggactctgggactgaagtaggtgctgggcaacagctgacatgacagttctgctgtccttcctggggttctaaaaccatgatctcttcaagaatgaggcttcgccaagctccttgaaacttgtttggttggtttctaccatagagctacttatgcagatactcaaatagagaaatcatggaagcagagcagtgaaaagttctcagatatcatctgaaccaatacctgtttctacagatgagtgtactgaggttcacagaggttgaatgacttgtccaagacacacagctggtttgtgacagatctaagaccagaactgggacctccagttctgatggaaacttcaggctacacagatttcaaggccaacagttgaggtttatatttgtgttaatttagtcaaactaagtatgacttaagtaaaatgaagtttaaatgatttgtttatgaaaaataaaatttaataaatagataagttcttagagtgttcatctttcataaattcaaaattgtgtgagaagaaagaaaccaagcattacctttcctgtagagaaacagccccagcgaaaagtctgaataaacacaatctgtaggtagtgcccatagacgctgatgactgacaccagttggatgagttcacagtgtgtagtcttgtttcattaacagtcttgtcaatcacacgtaaggccctaaatgtgtttataaagcacatgtactattatttttgacattgtccacacactaagtttttatgatgcaccctttgaattctaaagttatagagtagatgagctttgcataccccaaggaaaagaacacagtgatatactgcaaagcacagcatcctattgtaatttcatgctgtgtgggcattttctgcctgaacacctctcttggtaccaaggaggacaccataagattgaaccctggttcaaattctgctgctgccccagctctatgtggaaatgttagtgcctgccctacctctttcacagacatcttccaaagatcaaaagagaacatgtacgtgaaagtgttctatttggtagggggaattcaaccttgaggaggatgaaatggttttgatttcataggatggaaagaaaatcttgaattaaatcagattagatctttgtggttttctccttatatgtttagaggtcttggatggtggttttatttttaaataaaaacctaacagtaaaactaaagtgaaataacctttagttaaagatatttatccaaaaaagatgtgcttattatgttgaatacagatgtgtttatgatgttaaaggacaagaatagaagaaatggacatgactgacattgcagcttattcagcaaaactcaaatttagaatattgtgacataaaaccctgatattgagtttactgttccctcatctccttctgacatcatgttttcatggtgccattcaagcccaagattcattttttaaagtaagccttcaaggtacattgctcacaaacgtaatatcctcatgaagtccctaaataaggatgtaaatgtaattattcttttaaggaaactatcgtgggaaggaaatatcttcaattccagcataaaatcatccctgaattgaggattttaaagcttttggagccaacaccaattcacttgcatcaccaggccagagtagaagggctcaaagctctcctccccaagagaaagccccttggtttgactctgttcaggataaagtactgctgtataggcttccttacttagtttattgccaattatgtcagcttttcatattgatcaagtagtcaatataggaggttgcttttactgaaagggagaggtaagctctgtcaccacagtgatcttacagattttaaggtgccacatgtggtccaaaatgtaattttctcactacaattcttgcagtctgataattaatgaagtcctacgaatgcacaatgactagtgagtaaccaataccagaagaagctggagacaggcacgcactgactagagcactagaatgtgaacacctgaataccttgaagaatctgtgatcgttttacagcccaagcacagtattgttagcattgttattcctgcagtatttatctgctcttcttaatcttcttgcttattgattagtatggcatggggagcagcaccaaagcctccttcaccccctttgtggaccccagagtataccagacgtctcccactgatgaagatgaagaggatgaggaatcatcagccgcaggtaagcaagaagggccctgtgtttaaaaaacagcttcgtcttcctttctggtatgacctgataaggaaattaatcctcagttcagtagttaagctgattactgcttaggtcctatcttaaaaggaagactttttaaaattattatttctgtaggactcctaaaacaaatgtattactttccattttttttcccatctcttctatttcgtttctggtagacccaggggtacatagggaccctaggaaaagctgttcctcagtgatctctgaacataactaaatgtttccccaaaacaatttctgggtacaatgttttacacacattaggcacttaataagtgtatggtacattgtgttgagttctaggtgtgtgcttcccaccacaaagatcaggctgatttaaaggagtcttgctttctaatcttcttcaagtaattaatcatcaaagtcagcttaggacagtttttcaactgataaactgcaattttaaaaagtagatcttttttgcctatatacaagagtggggatggtgtatttaatttgggactttctagactctgcaagtagtgtctataagcctgtttttctaatgaataaaagattcctttgatgaatgacttagactttattctactaaaacaaaaaaaaagtgtaaaataaggagagtttcagagtttccttgcctttactataattcaaaccaaacaaggagaaatcatagtgttttgaagccccatctccataagttatcttttaagatgtcactgacttctctgattctttttctcaaagctctgtttactagcgaacttcttaggcaagaacaggccaaactcaatgaagcaagaaagatttcggtggtaaatgtaaacccaaccaacattcggcctcatagcgacacaccagaaatcagaaaatacaagaaacgattcaactcagaaatactttgtgcagctctgtggggtatgttggtgctttttttttttttttttttaaataaccactcattaatgaactgaccctcaaacattaaaagcctgtggatcttgtcatcaaaagaacactggttgaatcctgggtattagagacctaacttgggactatcttgacctcaggagaaaccaaaaggagttttatatgtagaaatagctgatacgctactagccaggaagacgagattagattcagagcaaccttgtcacacaatagtgataggctaaagccaacaagagaactagctaccactgaatacattgagtgggcaaagcaaagcctataatgtgatcaatcagaggcgatttgtgtctggcactttgtgatataccccacgttcattctccatgatccataccacatcctgcaaggggaatatgagcataaataatggcataaacctttatttcaagctgaaaaatcagcccagagtatttttgtgaattactaaaggtcataaccctagcaataacaagataaaacttgaaaagaacaacaaataatttaatgaactttcccttttagtttaaaacatcaatctgcattttctcgtgaaaaagatctgcaggttttagctgacctcaaactcaggagaggcatgatgagattctatcaaagtcttggtctgtgttactataaacatctcatacagattaaggaaggacatgtcccctgtgtacccactgaaaatactaggcttggattggggaaccataattttaaaaggctgaaagcatttgagatgttagcggggaagagtgtgaagcctaggaaccatttcatgatagaggctctgtcctctggagaagagacagaagagaacaagatagccacatttaatactgaaaggattaatatatggacaaaaaagcagacatttgtgttgatcagaagatagaagtacaagacgtaagagaagttagagagttacatgttcatgaataaagtacactgcacaatgagcctctcaatgtgtgtgtgtgttgaggggtggatgatacatttccctagccataaatttttaggattacaactacccagacaaagccacttatgtgcctgtgcttctgtaatagggattactgcatgggtgttgggctgcactagatttagagacctgagaagtcccttaaagtgagtatgtctgtgactctccagctattaacacttctcttgaatgggtttatcatttccctaaaaaagagcaaaaacttgagggtatggggcataagatagttacattttgattcaagaaggaggaagggcctttcttccattggagtatggaaatggaaattccactgtatattgaaggtgggtaggctagagaccactgcataggggtgggggtgaatcttggggaagaagagaagtgatttatagggagagccaagaaagaagtggtttttccaggcagggaataaaggcaaattatgctagcttcacatctgtgcctaaggctcctattgacaaggactctctgcattaggtagtaaataactagatgtatgaatgctgctaactttataaaagaaaactgtaatttcattaccagaagtacaatgatttaattattatgtcagagcttctacattcattagtttatatttacctacttgcccattagtgtatatttacaagtcacagtttcttaaattttatagggactctcgatgcagaagattaaagttcatgaaaagtcagtcttagggtgcttcttaaatttacaggtgtaaaccttctggtggggactgaaaatggcctgatgcttttggaccgaagtgggcaaggcaaagtctataatctgatcaaccggaggcgatttcagcagatggatgtgctagagggactgaatgtccttgtgacaatttcaggtatgttactaagatgatgagtcccccaggtccatacagcgggaaagggatccacctcatttctgcagaaacagttagttctgcccttcccagctaacaaacaacacaataaagtatagcagtatagccagagtgagattgcccacattttgtaacactgggaattctgacctccaaaaagaagtctctcacctctgcattaaatctgaattaggcagagacataccacaaaggctatatatttatagctctttacctctgtcaggactcagcaaggatcttcggatgtttttaaggtttctgcactccagttattaccacatacagacagaatatcaaaatgcaggcttcctagagggacatttagtaagcagaaatttcttggtctcttccctcaaaaattctcttgcttatagcccactgatgttttggcaggtgcagctggcacactgggtgatcaagtctacaaaaagatttgagtgtgggaatcattactgctatgctctgtagctttctgattcccaaaaagagccttatataggaaaaaaaaaaaaagatggagactaaagtgaaggccttgtaacaagttaaaaatgcaacctaaaagagggtagttttgttgaaagttttttttctttttggtatttgaaggagtttaacgagtaacacccgtcacttcccctctcattccatctagtatggaaccaacttgctactgcactttataatcacctagggagatgtgaaaatctaggctgcacccccagaccagagtcagaatctctgggggtggggtttaggcatcaggagcgttcatagtttctgatgtgtttccattgtacagccaagtttgagaacatggatttatgctcagccattgtttcacgaagagacaacacagggatgctggtttgaactttcctcaaagttcagctgtacttccattttgacaaaatgcttttgcttgtcactaaacttcctctttcttttacctttccactgaatgctcagtttcatctctttttattctccccaaataaggttaaccaggtaaattccttttgtattgccatttgagtttaatcccatgtagtcttttgttctggttaattgctgtcctgattgctatactaccaaatcaaaatgaaaactgcatatctgccaaaagtgggaatgcaaccagaaaattcacattcagacttcattatgttgttagtggcacatcttcattcttaacagtgtaagagtttccttttctcatgaggcacagatagggaaaggagaaaatgaaaataggagcaaaagattcttgaactaaccttggattcatattggcatagaaaggaggaaacactggctctcgtgtccatcctagctactgtgatcaatgtggattctaggcctttggttacaaaattgaatactgaccacacaatgattcccttagtttaggtgatgaatgtgctctcctgtcaaatgcatgtgtaatgctttactaagttctcttctgctggtatatattcatctataaaatataaaacattttttttgggagaggccgaggcgggcggatcatttgaggtcaggaattccagaccagcctggccaacatggtgaaaccccatctctactaaaaatataaaaattagctgagcatgctgggagcggcacctgtaatcctagctacttgggaggctgaggcaggagaatcgcttgaacccaggaagcagaggttgcagtgagccgagatcatgccactggactccggccttggcgacaaaagtgaaactcatgtctcaaaaaaaaataaataaataaataaataaaacatttttaaagcctaagataaagaaaaataagtatccaaaaaataaaacccatagagctaaatttatcattagttaggaagagtcatcccaatggacattttatctggtgcaaatcatcaaatggagtatatcaagttttgctacttgtgtactcttcaatattgtctaaatattttatcatcctatgaattctttattccaagatcactttaccaaacggaaatttaagttttcaagtttgcatcctttttttcctatttttgttcagtattcctttcagtgacttcagcaccataaacctgcccagtataattttctgaacccatattatcctcttgtttgttattaggttatacggtgaaggaaaggcaggtgccaaaatgcccagttgccaacacttcttcatgtgattgatctagaatgttctggaactctgatcactctgttgaagagttagctcttactaagttcagcagacactgctttgcattgggaagagagagtaagagcacatgctcaaataagaaaccacctgaagataaaagacattgtaattctgtgatgtgtctaaaacacgtagagctattttaaccataagttctggcagaaacaccattttaatgacaaagtgctggggacactggttattatgccttcatacacacacacacacacgtaaataaaataaattagaaataaatggaggtggggaaggaaaaagtgagagctgtcacagcaatttgaaattaaacctctattatttcaacaggaaagaagaataagctacgagtttactatctttcatggttaagaaacagaatactacataatgacccagaagtagaaaagaaacaaggctggatcactgttggggacttggaaggctgtatacattataaagttggtaagtctcaagacatggaattataagtttggtctgtttactcaatcagacttacttagttaggtttcacctagttttttctatcagattgatgatgcatgtgtgaccagcttcagatgttgctggaaccttcagcattatttatattttttaaaagccagattgatgaaattgaaagagtgcattcagaataaagtcctaggctccagtttgaacatttatatctactttcttccaaagactcattaaaatgacaagaaaagaataaaaatgccataagcctatgaggacagtgggaccaagagaagagaagaaatgtcggtaaaatcgaaagagtagctgagtgactggaaaaagacctagaataccaggaaattctgaattctgaatctgcagtgaggaaaatgatcaaaatcaatccaacagaacctggaaaggcccaggaactaaggccccaggggaatctcaggtggaagtggaggtgtaaggtgggactgaaaatagaattgttagaaaattcatgagcagcaagtcttccagaacccagtctccacctctgagtaattaggccactaccttcctctgctgcaacagaagatgaaaggtttgcacagccaatatgatgctgggaatacttgtgaaaacacacacacatacacatccctctaacccctacttagctcccaaatagccatgcctatactccctgggaagagaatgtaagaaatgtctttggagaaactaaatggccagaaagaaaagatgtacaggtactaacatttgaagtgccatgaaaaaagcttgctgcctaactaccctaaagataagcctgtctataccaaggagtggagaaattcacaaatatgaaggaaacctaaacaaacagaaagaaaggacgttagaagaaacagggataataaggagtggaagaaaatgtaaaaagaaagaaaggaaggaagcaagaaactataatagctttacagagattagaaaacttctttctataaaacaagaaaagggctgttaaaaaaaaaggtagaacaaagtaggggaaagtcatttagagaccaagaaaaaattttgcaaactaaaatgtattggcagaaataaaaaatgtaataaaagtgttagaagataaggaattctcctaaagagtagaacaaaaagcaaagcagagaaaatataagaaaataaaaagatcagtccaagtggttcaaaatctaagtaataagagttttagagaatatgaaatgaaagtattgaagaaagaatataagaaaggtatctagaattaaaagccttgaaatcccatattaagaggattcactgagtgtccagcatactaaatgaaagaaagactcacaaaaagacatatcaacatgatatatcaatacctgggaaatgagaaggccttcaaaactggcaaagctgtcagaatataagtaaataaataacaaacagtttacatacaatagacccagaataagtgtggcctgggacgtctcagcagcaatatagaagcttaaaagacaatacagcaaggccttccaaattcccaacagaattatttccaactagtattttatagccctcctgtgttaagggttaaggagatatatatatatgtgtgagtgtgtgtatgtgtatacacatatacatacatacatacagctgtatatatgtatgtacatacatatatacacatacatatgtatatatatgtgtatatacatatgtagagagagagattatgaggaattatttcacatgactatactatacaggctgaaaagtctcaagattttcagtcaacaagctcattcagacccaagagagccaaagttttaagtccagttcaaatctgaaggcctgagaaccaggagagctgatggtgttgttccactatgagcactggtaggctcaagacccaagaaacgctgatgcttcagtccaagtctgaaggccagaaaagactgatgtcctagctcaaccaagcaggaagactcagcctttttgttctagtctggtctccaaatgattgcataaggcccacccacattggggagggcagtctactttatcacacatgatttactcctgtcttaaaaatttacttttcatgcaccatttctcaggaagcaactgaaggatgtgttccaccaaaataaataactaaacctagtagtccaggaagatgacgaaaatacccagaatgatggtgaagggaacctggggtgacaagtctgccacaggcctagaaagaaataagtcctggcagagtgggacaatgcagggttccaggaaagatgcctccaagaaaaataaaatggtataaatagatgacctgctgcgtttgaccatgttgaagggcatttatcagcagaaagtttacatgtgcttagagagagatacatagaaaacaagtataaaaaaaaaggggggggggaacaagaaaggaaatgtaaccatggtatactacatacctcagtcatgaacaataataattttaacactcaatattgatttaaccaaaaatttaaaatacagctatatttagagtttacagaagtaaatcgtgtgtgcatatgcataagaaagagaagaagctagagagagaaggaaatgatgtgagaaattaaatcctttccatactacaaagtcagtaaataatgtctgtgactgaaaaaaaaaaatcaaggaataacattataatcatgttatttagaaatctggaaacaaattgctgaaagaagtagttgaaagagttgcaagcggttgtttttatggagcaggaatcagcagggaggcaggtacttggttttcataagccctagagttctttggctttttaaaataggtacctgtaagacttgttcaatccatagctgataagaaaatgtgtggaggcttttaaaatgtgtactagataaaatacattaattatttaacataaagaatgacaataaaggagcggcggaggaactttagacaccttcagttcaaaggagtccatgatgtggtctcagaaaagtatgagacacatttgaaattttaaccagtcaagtgggtccaatcatgtgtgatgacataatgtcggctgaaatctaatcaagtgtatcaaatacagaatgtggaaacagaaggggcatgctataaagaagagctcagaaagaaagaacttcagtgtatcacattttgccaactagaaaggggactctattttgaagcagagtctccacctgccttttctctaatttcattccaggtgaccttcccagataaccttgacacaatattaggaagtgttggggctggctagtgaacctgaaggtttggtgcctgagaaggacatgttcctcacttaataacatgtcactcacagttttacaaaggaaaaaaaaaaagcccctgaccttacaacattatctatgtcttacaacatagataatgtatgtattgataagtataaaaagcagcctttgggccgggcacagtggctcacgcctgtaatcccagcactttgggaggccaaagcacgtggatcgtgaggtcaggtatttgagaccagcctggccaacatagtgaaaccctgtctctactaaaaatacaaaaaattagccaggcatggtgatgggcacctgtaatcccagctactcgggaggctgaggcaggagaatcacttgaacctgggagatggaggttgcagtgagccgagatggtgccactgcactccagcctgggcaacagtacgagactccatctcaaagaaaaaaaaaaaatagcagcttttggaaaaaaaaaaaacgtttaatgtctgtaaacgtatgtggccagagccacatctacatctcaccggcacttagcacagagccaggcccagggaaatcagttaagaagtatttgtttttttaaaaaggaatggatgttcaaaggacatagctttattcataaaccagaccacatgcgggaatgtttttctatagcaggctgggcagcagtgcaagctatttgctccactgtacatttttgttcaggaatcagaattatttggtactttctaatagggataccctggaattctaattttttcttgtcctcaatctgataatttggcaaagtataaaacatacatcccatcattctcacaccaaatagaattcagattcatatgcatatttggttttcttttgaaaatagtgagctgctttctttgagaacaggtcatgttttcaggggaaagcaatagaaacaatttcaaagctgtttccttttgagtattttgcctttattacttggcatttgttagtccaaagatttctagtgatcaaattttgtgtccataaactaatactgtatgattacagagcaataaaattcattgcaggaaataatgcaaaatttctgaatattatctcttgcatatacctgacaagtgtttttcaaaaacatcaggctacaggaatcctatttgacctgcacatctactgttggcccttctaacatttctgacgtcttccttctaatcattgccgtcccttcattgtcctaacatcagtaggctgatctatatccacacatctaaagtaaaatttaaccagggagcaatatctggtaattctctatcagaaaacttgagaccagcttaattttcagaaacactgtttgccttagttatccaaagaaccacttgtagtttccacttagcttcccctatgaaattccagccacaacagcactgacatcttcttgtagcacgagtattctagtatgttcaaattcttgtgaaattttaaaaatataaaatgagaataaaaaagaaaagcaaattgtatatccaagagtcatttaaaatatttcttgatttatctgagcctatatgtgcttagataagtttttattttcaagatgattttaaatttctttaaaaatataaacttatttatttcttctttcaccctgaaaatcagcaaaatctgaagggatttttttttcttttctttttaaaatttattttagatccagggggtacatatgcaggtttgtttcatgggtatattgcataatggtgaggcttgggcttccagtgaactcatcagccaaattgcgaacattatacgcaacaggtaaattttcagcccttaacctgccactccccttttagagtcctcagtgtctattatttccagctttgtgtccatgtgcaccccattgttagcttccacttataagtgagaacatgtgttgactttctgtttctgggttattttaccctaggagattggcctacagctccatccacgttgctgccaagggcacgatttcattctttttatggctgcatagtattccatgctgtatatatacaacagtttctttatctaatcaaccattgatggacaacttgataccatgaccttgctgttgtgaacagtgctgcaataaatgtacaaatgcaggtgcccttttgatttaaaaaaaaaaaaaaaagttattttcctttgggatttacccagaagtgggactgctaggtagaatggtagttctatttttagttctttgagaaatctccatactgtttcccaaggagactgaactaacttacattcctaccaacagtgtataagcattcccttttctctgcagcctcaccaccatcttttttttttttttttgaccttttagtattagccattctgactggtgtgagatggcatctcattgtggttttgatttacatttctctgatgttcagtgatattgagcatttgttcatctgttggttggctgcttatatgtcctcttttgagaaatgtgtgttcatgtcctttgcccactttttaataggattttttcttgttgaattgtttgcattccttgtagaaatttgttggatgcatagtttgcaaatattttctcccatcatgtaggttgtctccttactctgttgattgtttattttgccacacagaagctcattagcttattaattaagtcccatttgtctttttttgtttttgttgcatttgcttttgaggtgttagtcataaacatgttgtctaggccaatatccagaagagtttttcctaggttttcttattatagttttgggtacatttaaatctttaatccatcgtgagttaatttttgtatatggtaagagataaggatctagtttcattcttctgcatatggctagccaattttcccagggtgtcctttcctcattgtttatgtttgttgactttgttgaagatcagttggttgtaggtatgtggctttatttctgggttctctattctgttccattgatctgtatgtctatttttgtatcagtaacatgcttctttggttattacagtcttacagtatagtttgatgtcaggtaatgtgataccttcaactttgttcttttagcttaggattgctttggctatttgggctcttttttggttccatatgaattttagaattgtcttttctaattctgtaaaaaacaacattggcaatttgtagactgcttttggcagtatagtcactttaacaatattgattcttcctatccatgagcacgggatgtttttccattcatttgtgtcatctgtggtttcttcatcagtgctttgtagttctccttgtaggggtctttcaccttcttggttaaatgtattatcctaggggtgtgtgtggggtgtgtgtgtgtgtctgttattataaatgggattgagctcttgatttgattctcagcttgagcattattgatgtaactgatttttgtgcattaattttgtgtcctgaaactttactgaagttatcagcactaagagtcttttggaggaatctttagggttttctaggcataagatcctgtcatcagcagagataatttcacttcctcttttccaatttggatgctttttatttttttatcttgcctgactgttctggctaggacttccaatactataggagtggtaagagtggaaattcttgtcttgttccagttcttagggggaatgctcttagctttttcccattcagtatgatgttggctctgggtttgtcatatatggctcttattattttgaggtatgttccttcaatgccaagagctgtggatcttttcctaggtttcagatgaagagatcagcaaaaatagtctaataaacactttatgtcatgaaaagttataaagcaagtaactggaaacttaatgtcatttaagtatattaaaatttttcctacctagtttctttaggactcagaatattctgtttcttgagatattttaccaagaaactgactgccatgtgtaccaactgtggattacgaattctctaagaattagaatccacacttaacagcaaaagattcagaaggcacttaaaggattgttcaatttctcaaggtcatcaccgtaaacattgcttattattctatcagagacacacacgtaggtaagagtaatgaagagaatgccagacaacagtctgttcttccatttttccattcaataagcatttattgagtactactttgtgtaggcaaaagcattgtggggactcaatcatttaactaagcttctgtccatagaatttacaatgcttaatattccatctttctaaagagtaaaaggatttgtcagtattcgtagccctttaagccactaacagaacccaagactcctaacacccccctttcgttagaagcataaataagcaattatttcacttggtaattggaattcaaatataaataataagcaaatggcagcctttatatctgcccatttgctaatttttctaccatcttgccatatctgctctcagctacttaaatatgggtgaacgtaaaagccaggcaagctaacatgaaggaaattatgcacattcttattacaatgaatatcaacatcaagacctagtgttaaagacagtcctaagcagttatatctctggatgatgaaaagtcttcaatataaagcaaaagccataagtattctgccaaccaaagttcgctaagggaagctaaatcagtatctatgaaaaaatcccacaccaggaatatcaccttcatgaagctgacacccaacatcaatatttaaatttacatattgttgcttatacattcattaatattaatacaaagaacttgagtaaattgatgtactttttcactcataatttttctattacagttaaatatgaaaggatcaaatttttggtgattgccttaaagaatgctgtggaaatatatgcttgggctcctaaaccgtatcataaattcatggcatttaaggtaagcagggatgtgattatctaaaatgtgctttttaaaaattttccgtttctacccattaataaaatagtccatatagaccaataccaattttcatatagataataaacctgttttaaaagtgtaggtactctagggtttattgtttcaaaagtaaagactgaatatttgtaaatgctataaaattagattaaaatttgggtatgccctcctccttgagatctatgaatcatcatcctcaagaggcatttagaatggttagtaggcatagcattgattatgatcttatgcaatgacatttgttataaagccacctaaaccagggtattccctgatattttgtttgaaaaaggcagacaaatggcagcactgaatctcagagttaaactgagtctcttttaatcctcataaatctttctgaatgaagtccctaaaactcaggtgatgcttatatgtccccagtgctaacttacagaaatgacctagtttctctgcattcttctattttgattgccttttcatttttttaccttgtctaagtctgtacccaccatggttggattggtcactcatgagatttgccaggagtgggatggggatatgctagtcctgttgaccccagctcatgaagctgacacccgaataccaggaggaccagtacttacaggcacccagatgtgttcagagccgcataacctatccatagcccaagtgaacttatcttctgttttctctcactctctctctctgatctctctctgtctctctctctctcagcttatgtctgtctacttctttatgtctcattggctctcactttttctccccacctttatgactgttatctccatttggctccttattattttctgccacattctcatgaagggcaaaactgcccttggaacaccatgtaggcccacttcagagctgaatcacttctatcttgttcccttagggcagatggcttctgatgtgctcaagaaaatagattcattaatggaaatgggctcccctccatgacctcacttttatggaaaaaaattggaatgcattaggttactaataacaagggataactcctaaaagccaaagtggtactcctgttctgccaaaatctatctccacaaaagcttttcaatcaacatcccattcccattcttgctctgaagttattgccattattttatgacccagagacacatgagagagtgcaaaatgttctttctgacagaccctatccagcccagaaagagggaagagcaaaggcaaagacttgaacaggaaagagtggaactggcaagaggccaagccttcccataggacaaggacaggacgctagagcttcccatgctgtcagaatggtgttagcaaaagatgagaagagaagggtctgagaggtagcagtggcattatagttaaggcaattgtagtttcacaaatgctctcccagatctcaaggcccaaaggtagagcgtggttaaaaaatagcaaaggaaaatggcagaggaacacttgacagttagttggggcttgggctctggattcaaacacagagaactttgacaaacttggcaagatctctctttttgctttctagttaaacccaaatagtcaatgcaagccatcaatcttgtgatgttccactcccacctctttctctaccacccaaacccaagtctcagattccaacattaagagaaagtgccaatcttatgcctactcattcactgaagaaaaatccaaaccagagcatgcccattaatactaaacaggctgagaaaacagccggccttggctgtccctcccaggctgtctctgaaagggtagttgctgtggatgggcctggttgccacatgggaaagaggggggccagagaggtgactgggccttcttcagaggacaaaggccagaaataaacaggaaaaaacagcaatacccaggcaccaggtttttaatatacattaccactatcaaaatttacacctgtgcaccaacttaaacttcactgccccgaaggacaaagggtagagaaaggggcacaaatggatgctagacccttcctcctagggccagaatatcaacagacctaaaactgaaagagaaattttctagtttttcactttaataaagttagaagttaacttcctctagacagtggctaaaggaaaaaaattaagatgcctctttgagtgatgcggatactaatggggtgatttttaaagtcttttgcagatctccagcacaagcctctgctagttgatctcacggtagaagaaggtcaaagattaaaggttatttttggttcacacactggtttccatgtaattgatgttgattcaggaaactcttatgatatctacataccatctcatgtaagtactcagaagtagactttcaagggctctctgtacaacagcctgcatgtagaaagagatttgttttgcatagttttagtagaagtcatgcacactttactaaccagcaaatggactttcgttcttcattaagtatactgcttttaataactaaaatatataaatttaactaatttttatgacttcctaaaattggggaatacataatagaaatcatttggcatttacatgttgtctctttggactttagattaaaatgaatatgacatatttctttcaagggcatgaattatattcggtagacaagtttccacattcagtttttgaagggaaattcgttcattttatgttagagaaagccaatggtcaggtactaatttattggagaaaattctttttttgctatttttagttcctctcttcagcttgagggcagtgtggtacactggagtcagacacagtggctctagcatgtattagctttgcagtaatggacacagtaggcagcctctccaatcctcagctttcgcatctgtaaaatatggataaaaagacttatcccataggattatcattagtattaaatgaggtaatggatctaaagcagttggtacagggccctgcaaattgtagatcttcttattagccctaaaatattcatattactatcctgacatattgcttgaaacataactgttaaagggaaatgctgcacatggattcacttattaggattaagtgtagtgtaaagtgtgtgtcctgtgtgtaatcccaagactaacacacaggagaaactatttatcaggaatgtttgaagctaccgctgactggtattttgagagttttaagactttattctaatgaaacgcaataactaaaagaagttgtttcagtatattacatacacacacacgactgccattcattgctgcattattaccacttttaactcatgtggatgtgggtgaacacaaggactcacagctcacattcctggtgaggcagctaaggtgtaactatgataatcctcaactctcttagtccaatctgtcaagcacatgttgggctgccatggcattctcaactaggggatcacaacaacatcacatttcctttcctagaacaaattaatatacacttatttcaatagtgatttttttttttttttttttggatacggagtctcgctctgtcacccaagctggagtacagtggcgtgatctcggctcactgcaagctccgcctctcctgggttcacaccattctcctgcctcagcctcccgagtagctgggactacaggtgcccaccatcatgcccggctaattttttgtatttttagtagagacggggtttcatcgtgttagccaggatggtctcgatctcctgacgtcgtgatccgcccgcctcggcctcccaaagtgctgggattacaggcatgagccactgtgtgcggcaataatgattttttttaatgagtggtcattctaaatattttttctaaccaagccatgaattattctggcatttagacacccggataaacaatcctatatatatatttttttttcacagattattttggtagttcattttgaccccacttaagctatctccattagattcagctggcttacattctcctcatcttcttttggaagtggttgtgctaatagaaaacacattaatttcaacgtcagcaagatatacacaaatcccaactctaccaacaaatactagcacaactttggttaagacacaaagcccttctgagatgcagtttcctcatctgtaaacaaagctatctaccttggggagctattgtaggtactagaaattatatatgtaaagggccccatgactggcacatagtaggtgtgccatagatttacatgctctttttaggaacaggtaaattgaatttttaatctagtgactaagtttgatttaccagggtattttacaagtcagtggttaaattaaagcaaatttcagtctttagggtgacaatgaaaataaacaaaaacctcttttttgcagttgttagagatgaatagtcaaggtgttttattttttaaaagaataatgcttggcttttctttgtcttctagattcagggcaatatcactcctcatgctattgtcatcttgcctaaaacagatggaatggaaatgcttgtttgctatgaggatgagggggtgtatgtaaacacctatggccggataactaaggatgtggtgctccaatggggagaaatgcccacgtctgtgggtaggttaaccattccttatctccttcagcagttacaccccccaaatgaaacgaaaatcaagaaatgtgaaacaaccatttgattccacaaaaaaaaaaaaaaaaaaatctgtgaataactcttgtaagacttgctttgtccatttatctcaagtcgtttgtcatttttgtggttaagatgtgaacagatgctgtgagttattgcccatctaatgtttttaatgcagttttggaaattccttttgacagcctacattcattccaatcagataatgggctggggcgagaaagctattgagatccggtcagtggaaacaggacatttggatggagtatttatgcataagcgagctcaaaggttaaagtttctatgtgaaagaaatgataaggtaaatccgtttcaacatttgcattagtgtttgcattttaagagaccaccaggtacctgtgaaaccttcattttcctttatactgatttgaatcacatctgtgttaaacaatcaatattatcttgaaatggcattatttggtttgatccatgtgagcactcaatatattattcacatgtcaaaaactacataaaaacatttagaaatttcttgtaaacctcttagaaacctttgtggcctaaaggccttttgatgactcagcagacaccccaaattctcctaagcacttagagcagttggcccatcattaatcatctcacagtgggtcaactttatacttccacttttagacttttcacaaagtcactttcaagacctaaccaatcaccttatattcacctttaaatccaaaacatttgacgtttagaaatataagctttttaaaaatgtcacccattccttaaggaatgcacaatcacaaactcaactagtgccatgtcttgtgtcattccagccatgtttcttctgaaatgtcataggtgaactgttttccagtgaaattggctgtgtccgtctggcatgatcagtgacctcagaggggtattctgcagcagtactgcttctcccttaccctccctgtagagtaaccccgaggttttagtagctaagccatactgcatttgtgaattcatcctttgtggctgtggccaacatagaaatgctgtccccaaagccacagacataaacgcctatagaaaaacagtatgatgggttgaatttttgtatatccctttgtccaccccagttccccaaaggtcaggttggtcttagtccaaacctggtgatgtgggcctaaactatattcaaccctggcccactactctgacctgatgtggtctgggtggacagtagctgcaggtggcaaagatggttccagccatttagatttcccagaaaacaaacataacctagtaaaactccagctcccacccagtctctaagaatcaaaaaaccaggagtgatctgggtatggatacccacattccgattgaaaacctaccccagcagggctgttccaagccatgccacacccttaggagtaggctggggccacaccagttgtctgcaacccaaggtttacagccaggggcacacaacttggagggaagagcagccctttcttttcttcattgtggttttccataggccctctctgtccttctccgttttgattcattgaccctaagagtagcattactttcatatgcagcattaggtgaatgtcaagcatttccagagacctccctaagaagttgttgttagcattcttctgaagaagctgtagaaatgaagtagcagagactttagactagtgacaaaagcaactacctaacaaaagttaggtattgactgactgaagggctaggccatagcccaaaatattactttcctggggcagtggttctttaacattaaacattcagctcaagcaagcagtaacccaaatttttctcacgtttgtcagttgtttgataaaatgacttaacagactcagacctaatggactgtggttctcctcattaatgctatgatctcatttgccctgggatatgccaccatcagcagagaaaccatgcgttaactcttgaaatgccaaaatgagtaggcattaaataccttgccctatctgaccacactatttaatgtttttatcttaaatttaaaaaactgaaatctgaaactgtatgatagtcagtaggcctaaaactcccccttgactttgagaatttgaagggattcccttccatcctgaagtctactttcttgtcatttaagggtgagagaagggaagcttctgtgcctttctagaaattaacaaagaacctgttgggtcctagaccagaaatccagcacgttatcctagcatgaaactcccttttaaaaagtgaacacccaaagagatgttacaaatgaagatatagccccttcagcatctctggagaccaataccacaataaggaataataacaacctaggaataaaggcaggagtttttacataggatgcacgatatccaaagggactttataaacacaagccattgagtcttaagacctgacacatggcaaggataggacatgtgagagaaaatggatggacggttgaagaaaagaggggaaaagaccatgcagttgaactaacttctttttaatttcaaacaggtattttttgcatccgtgcgatctggaggaagtagccaagtgtttttcatgaccctcaacagaaattccatgatgaactggtaacagaagagcacttggcacttatcttcatggcgttatttctaatttaaaagaacataactcatgtggacttatgccagtctagaggcagaatcagaaggcttggttgaacatatcgctttccctttttcctctccctccgcccctcccagtacagtccatctttcaatgttgcagcctggttgagaaggagagaaaaaggtggcaggaatttccaggagatccccaagaatgctgccttgtctgtggacaaagatggaccatgtgcccttcggaattagggatagaaacaaatattgtgtgctcttaacgattaagctgtgttatggtgggttttcaggtttttaccttttttctttacccctttactctgcaagaatggggaaagaatgcatactgcgaaaatgagtcttttaaattctgtctgcctactagttttaagtatatggtatgttgtaaaatttccaatgatgagagacagcacaataaatgtaccttatctccttaggctgaaggccataactacatagtggagtaatttaagaactctcttgccttcaccaacccaaaaggttgctttttgatagcaactggctaatgaatttttaaaaagagaagaaaaatactagttttcccctcttttgggaaatagattttaaatggctaaactactagccttaaaactactagtctaataaaatcaactaccacttttgtgaatctgacaggccacatttttatatggccctttacagaatggagtgtgttgaacaggatactaacgccattgagttgagctggcctagcgatggagggacactctaacacaactttccctcagctattatgcaacagatcagggaaaaagatgggatgacagatggggtcagacagaaagagcttctgggaaacaagcttacatagtcttttttaaaatgcacaaagcctcccagctaagaggtcacttggtttgggcttcattaggactgagactttgttgagttctttctgggacttggagagtggatgatattcaggctctgaacattcccagcgctctcccgagggtgccactttctcaagatgaaaactgtgactgaaaaaattaataataaatgtttctgagctgcctgtgttctccctgtgtgggtgagagaagggactagactcctaagcctgcctcagatacaagaggcatcattggctccaattttagagaacttgaaagcaaggctttggacaaaattttgagaccctaatcactttaccttcctccaaattacccaacatacggtaaacaacatttgtgcagaagtatgtatgtatttagttcaggttgacttgtgtccttataaactcttactcaaatgatttgaacttttatgcgactgggattttttttttccaaagctacaagcatggccgcctgtggtatcgaggtgttgcaaacaatatctgtgttgcgcttcctgttttaacctacctcgttttgtttgtttttgtttcactgttcatcacagcagtgttatctccaggagacatatagagagctcaaccggcaatctcaggtgcatttaacatttttaaaacgaaacagtagttgaccaaatttttcttcttaaaaaattggaagtggggggaatccaatgacaaaaactaatgtggcttgtttctggagaaaataattactgtaaatggaacaacaacaacaaaaaaaactacgatcttactgactttgcctaaatacacaagcagctgatgtactattaatgagaacgaaatacacattaggaaaatggagccatttcaatctagtggtttgggcaagatggggaagagaaggggaaacattctagtttctggattacattattatgcccctcctgaaaaggtggttgtcatttgcatttatttaaagcaggtaatatgcaggaatgtaactgaggattatcttcaggcaatcagcaagatatcctcctcatggtccctttagctctcaaaagcaatgaaatcctcctgttctcatttttactgctgtggttgtgctgctgaacaatactatcttctcaaattccatgccacaaattcagcaataactttttggattgaatttaacaactactgtaattggatgctgatgtggacaaaatatattgatttcgatttcactcccgaatgtgattgccaccagctctttatattgctgctgtggtattttaaaccagaagcttctttaaattatgttgcaaactgatctttgtttttatgttttgttttgtttttatttctaagtgataagtttgaaacacacagctttaaatgatttttttattgtgggattttgggtacagttaagaaataaaagggaatcattgtgtttaaacataaggtagtttgtgaatgtattttttaaaatctagagtcattgaaacaaatcataagaaaacaatattaatgcagtcttgtttacagtatgtacagtgacataacatagaacatgagcttttctggtgccaacaacaataaaacacacgttaaacatcaagccatgccttttatatttttgtactaatattttacactgagtacaaggcaaatccaaatttaaatgggccccccagaaatctgtgctctttaaaagacagatatttaaagaattcactgaagcttttatcttcaaaaataaattttcctccagcaagacagaccccagccctgacataaggaggcctagaacatgcagaatacgtcagaatggtgtccttgtggctcatccaaactttctgaattgccttaattctttttgggggtaggggaggaacggttgcttttcatccatttttatagcatctcaacaaaaaaaatcttcagttctgatctttttataggtgattttgtctctagaaattggctcattttatttttattttcctacaaagagaaactggagaaactgagccctcccctcagagtaagtttcactagatctgccagttcttactgctctaaattaataatcatccagtaaaatctactgagcctgcccacaccatagtctgggtctggggtctggcaggtgaccatcattcctgggtgccagtcaaagatactgtagcatggattcctgcatccagtggtggtaggaatggatgaccagtgaagttccttcaaataatgaggctcttccccctgccagttccagccagaccactgtcataacacacaatgcaaatgaagacagccttcactaagttccacataaaattgaacagctctattttagatagatctcattatttttcttggagacttctaaacaatccttcaagaagacctagaactattatttttattaaacagggtatattaagttatgggtgaaatctcacaaggtcacctggacaggggctccatttttctaacactttgacattgttttctagggtgcactcctaatatactttgcatcaagtacatgttttttaaaaacaccttagttcctggttgtcaaaacctactaacaatttttgtctgttcttgtgactcattggtaattggtgtctctggtccctcctgtccagtagattattagaaagatgtgaaattccagccagaaccattttggttttatccactgccaggaaaggaaggggctaaagtctcacattccacgaagcttttaaaaaaatgctttccctactactatgtgtaccagttcccgtcactgtattcttgaaacgtggaagagctctttgtgttaacagtgtgtgctgtctttgaaagtctgcttgaacaggcatcacttgcatttgtgctgattgctttaagatgtaagatgtgctacattatttttaagaaaaaaaatagttattgataaaacttttaattttaacctactgcaggaaaacatgagaaaatccacagcatgctgataacaattctgaatgatgctactatgctctttatattccagaatcaccactggtaccatgttctgatcatttcaacagtctctaacttgttagttaccttttagttcattcttcaaaatttaaatctaaccaaatcaagcaaaacataaccaaccaaccaaaaactgacctcccctgagactacatagttgtaacataaatctaaaatccaaaagtctaaatttgatttaatttacctgctaatatttctcataaatgccactatatctccttggtcactatatatcaggaaccctaaagtaagctgtcctttcatggatcttaaataaattgggtgtaaaattgatcacttttcaggagtcccagcaaagaagaaaacctcttgagaatttgcaagttcaaaactgacaatttgtatattcctaccaaacattttctaggttgtttttatttctacaccattattctgggaattcttccattgataactagaatattcaacagtttgcttagcattaaacagtgtgagatcataaccctgtgctttggactttattcttctagacctgccattccaggaagtgccagaatataccaaaataaaaatccccataaaagcatttttaaacaaaaatccctgggtaatgtttgagttattttaaatctagatcaaaatcttggattcttctgagtccatgatgacaaatgtttggatgaaaagtagaaaatacagttaaaaataaaaatgtcctaaagtttacagatttttgagtttgtgtacatatcttcaaactcactccttgcatgatagggtttggttttaatggtttatttttatcagcaccaagttgcattgcactattgaggctgagcaaatgctggtggaaaggtgagttttcatttctggcaatggatcattatttgtacactgtaaatatcatgcccagctacccctttcccttatctcttcccctgggataaatgttaaggaatagtaatacttattatggtatgtttaagaaaccttggacattaccctgaatcaaaacttcaaatgttaggtggcagcaggaaacaaaagattacagcttgaatgaaattttaaaattgaatgttgtaaaactatttttgaacgttttagctgccttatttatgttaatataactgtagagagatgccaaatgtataatatcagaagggaaaactacgattttgctgtgcctacaattgtttacattttttaaatctccagttttcaaaagtattttaaattgtcaaacatttgctaaaactggattataacctcacctgagaatgagagaagaaaatcttcctggcatattttccagtctgaaacttttggttactttcaggtattttttttcttgcatacaaaaatcattgagaaagtactttctacagttattctaagcagtcattaaaaatgctttgataggtttccccacatggtaactaccatgtcctggaatataatatgctatctttgtcaaaatatgaataataaaacattaatcgta

SEQ ID NO: 3 - DNA, 82402 bp, Homo sapiens
  source 1..82402: mol_type = other DNA
ggagacagatctgactggccaacgtcgggcggaagtcgggaggttgggtggtctgtaaacgctggcttgtgacagggagggggaggaggaaggccttcgtaaaggttgcatctccgtcccttcgctcccggggacccgcgggaaaaaaaaaaatccaacacccaggccccgcggctagccccttcccacaggctctctccgctcgattttgtcaccgttatgtgggaagcgaatccagtgagtagccgggcgggacggggcgggcccagggggcggggttgatgagagaggggcgggagggggtcaccggaactgcttccccgcgctcgcttcagtctgggtgttgagttccgggaccggagttcccgggccttttggcttctgtagtctgtacctttttaagcagtggaagtgcctgggtggattctccaatgctttattgttttcttgttacaattatttattttacttcccgtgatgtttcagcctcatcccttcaccatttgttgttgttgttgtttttgagacggagtctcgcactgttgtccaggctggagtgcagtggcgtgatctcggcccaccgcaacctccgtctcccgggttaaagcgattgtcgtgcctcagcctcccgactgccttcactgttttttgaaactttgtgttttgctttctaattggagtaactggccttggaacctgtagtcagtcatttgcctcaggtttacctgccagtcccaccagtctaaagcaagggaattgggacccccttgtcttgaatgggcctaagaggagccatcagttctccttttcccttcttggtggacagtcgtttaaaacttggagtatggactgtatgttcttagatgttttcgttcggtggacaaagtgatctggagcatttcaactgcaagtctgccttcttccttggctgactctggtattttcattatgacttcatgtgtctttgtctactttgcttttatacatttatttatttaaagtgcaacgtaggggccgaaaactttagtacctttcctcaccacccattgtaaggatcacagccaccactccttaaaacagaagataggttaacaaggtaaaagcagagcaaatctaatcaaagttttacaccaccaggcacttcagagaccagggagatctctatttttatgcgtaggacccatgaagaatagacaactgtgtaaaaatgtgactggacaaaggatatactctaatgttaataaactgaggaaggaagcccagcaaggtctgtttgttcagattcttcttggcctctctgtgtatcatttcttcctcctacggaggaggaaggtcccttctggaatgagggtcttagcgacctactatcaggcaaggtagattagagaatttctttatggccagttcctatagacaatggcagggaaagcttaatagttccagtttttatggcttgctttgtaggagagggatcctagtttctatcactcaccttggggaagaattctggtttctgtgactcacttctgggacgaaagatgggcaggagacagaagggcaggagatcagagggagagactgcttccgaggctgcttctgaggccttccaatctcttttagttcaaagtattcagcatgccaaagtgtcatacttcggggtagtattttctgagccccaacacaaccctcagagagtgggatctatttgccaagagtattcttctgttgttatggttgaaactgcctggtaaggtggcagatgtatggtatttaaaacttaggagttgactggaaaaatggtagaatcacatttcagcaagttgttggactaaatacagtcgtgcgcctcctaacaatggggatatgttctgagaagttcattgctgggtgatttttttcattgtgccaacgtcatagagtgtactttcataagcctgctacacacctaaggctatatggaatagcctattgctcttaacctagaaatctgtacagcatagtattgtactgaatactgtaggcattcgtaacacaatggaaagtatttatgtatctaaacatagaaaagatacagtaaaataaagtgttaacaatctttgggaccacttgtatatgcgatccatggttgactgaaagcttttatgcaatgcataattgtgtatgaaacataagaaactactcctatgctgagataactgcataaatttactttaataacccctaatttccatatttgcaataatttcctataatcagtattcttcccctctcatttctggaatatatttccagataagttagaaagtttatcagtacatttccctatgtttttaagttaagtttttatccagtagaaactagtctgttggtctggatttggtagttgcacattatggttccttcttgtgcatcatataacaatagtcatcatcttagtattttcgattcatacgtataatactctcttcaagctgcattagaggaaagtaattacttgtatttgattttagcaaaaataatttagaataatgagaatgtgctctctgcttatatattcagtttcactatctgtcatcaacaaccttcattttgtatttatatctttatgtagctattattccctttttgttatcagtccttcttaatttttccataacaaaccctttagccacccaagtatatgtcttactcaaggttttaaatctttcactatattgtaagatccacaaggacaggggtttttctctgttatttttcctatagtatcttcaactagagaacagaacctgacacatagtaggcactcaataaatatttgttgaattcatgatggtggttgtaccagcaaggactaaagataattctttgctcctactatgaattttccctcctgcgtcacacatacatcagaatttgctgttggattatttgtgtgtttgtgagaattataaaggcattaatgaatgtcttatatacttgatttgttatatcattatctcatttctttgtaagcaatgggttttctttgaaatcacctgtgtgattttgctaatttcagcagagcaggctgacttttgttaaaagtggggaatcctccacagatcatctcacattcttcttttgccacccaaataagacatatttgtcttactgctactgtattttattactactaatagtttttcttcctataagcatatgaatgatatcagtaagcgcaatttggttttaaaaatcaacattctacgtgtgggtttctctagtaatttgttagtttattttagtttcgctttcctggtttcacttaccacaatttcacttaccagaagtcagctgcggtctgaaaatatgaaatggaaaattccagaaatgaacaattaataacttttaagttgcatactgtactgtgtagtgtgataaaatctcatgccattgtgctccatcctgcctggggccacgaatcatccctttgtccagcatatccacactgcatatactctacctgcctgctggtcatataataacatgtaatgtcactcacttatttattgagcacctgttataagctagttagtgcgaagtcccagggtttacagtggtgaacagaacagactaggctccagcctttatgggtttgcagtctggtgcaggcaggcagatattaaacaaataattatgcaaatacatttaatttaaattgtgataaaaagatatgaaagaaaaagagtactatgacagtgtagggggagctaatactagactgggcaatcaggaaaggccaccctgtgaaagtaacttttatagagatctgaaggattgagcaagcgttagccaggtaaaggttggctggaaggtggggagagctgttcagacagcagagatagtgtgagcaaagatcctgagaaagaaaggagcttggtgcttgagaaaaagagagaagcctatgtggctgggacacagtgcaccagaagacaagcccaggaggtaggaaccaggccatgcatggatttgaggcacatgtttaggattttgaactttatccttagaggagtggtaacacattgaaggaagtgtcatgaacatatttatgtttttaaaaagattactctggctgatgtgtggaaaatgagtttatgtattagaaaatatggtagacgtaataatggcctcctaaagatatccacatattaatacccagaatctgtaaatatgttgttacatggcaaaagggaggtaattagctaatcagctgaccttaagataaagagattaccttggattatccaggggggccccaaagtaatcgcaagggtccttaaaagtagaacatggggacaaaagacatggagtgactatggaagaatggtcaaagagatacaacatggctgactttggagatgaaggaaggaggtcacaagccaaggtatgtgggtagcttctagaagcttgaaaaaccacggaaatagattctctcatacaacctttagaagggaatcaaactcaccttgattttagcccattgagatgcatgtaagatttcttcagaaatgtaagaaaataaattagtgttgtttttaagccactgcgtttgtggtaatttgttctagcagcaaaagaaaatactgagggggataaggggctgtaggaagactaattaggaggttatagtgtagtccagggtagagacgaaggtgacttggactatgtggggaaagtatgaagtcacctatgaaggtgactactaagtggggagagaggagatcaattcaagctgcatcttagatgatgacttagctttctggcatgggcagccaggaataagatgttttcactgagccatatggaagataacaggagtttggttctggactcactatgtttaatgtgcctatgaagcatcaggtagtaaagtttggaaggcagttggttagggaggtaagtctggagctcagagaagaaggctgggctggaaattgaaatttgagcctcagtgtctataggtagtctgtcacccaagctggagtgcagtggcatgatctcggctaactgcaacctctgcctcctgggttcaagtgattcttgtgcctcagcctcctgagtagctagaactacacatgtgcaccactacacctggctaatttttgtattttagtagagacagggtttcactgtgttggccaggctggtcttaagctcctggactcaagtgatccacccgcctaggcctcccaaagtggtgggattacagtcgtgaaccaccgtgcctggcccccaataaaacagtattttagaaattaatgtttttattatcattgagaaggatgattttttttttgcagcttcttacaaagtacttatatctaatttgataatagtttgagatgtaggttagaccacattttgattactctgtatgtctactaaattaggaaatgttgtgccacaattatagattgtcaggaattgcaacttgtgtttgctggcgctgtcagatgtttaggaatatcaaggtcaaatacagactgaaaaattatcggaagatttctccctgaagattatatcttgtgctctttcagttgcgttattgagaagcctgtaatattagggtgaatgtttcaaccagcctgaatgtttggaagatagtaacaaatggattcttaagtcattttttgacttcttcagtatctggaaagtattttcccatgttttgttttaacatttagtcatgttctttatacacacaatagtgtaatcagtctcactctaagaagtgaagaaaaccatcaggttttgggaaggaatcacatcctagcaattgagccatttgcaacatagcttggtgactttgaaaaatatggtattttattctcagcattaaaaatcagggtattttggccctgaagtagtaggttcacgctatttaaaattctagatatatctctgctatactccacttaagcaggcctctagaaaacatagaattactttttggtattgtcagcattatgaagaatttttttgttttttaaaatctcatccctcatttcagaaacttgtcagcaccttttttccttgacagccagcaaacttgcgtgggaagaataatcttgcaaacgctgccatttccttctgcaacatctgagagcgcatactctgaatagtcaatatttgatgatgtttaatttccattatttccttcaacactcagttataatcaggaggcatattgttgactcctgtttcatataaagaatcttttagtaacataacagtgtatgtttttgctatttgtatacttcatgctctgtcaattttgaatgtgtggcacctttttcaacttatgtcatagctcacaaaagtatcattgtctaaataaaaactgtcttccctgtactataagttttcactgatatgtagaacaaaaagttgttgagtacttttaccttatatactgtatatgtgtcaaggactgatttatattttctccacaggtagtttgtccaattgtaaaacaaaatatatgctaaagcactcaacatgacagtaattgctcttctatattgtgttgcatgataatatagcatgataatatatgacatccagtagaatcatttaataaagaattttggtcaatagcttgtttcttctcaggcattaaatttgaattgactagcttctcagcagtatcaagaatttttacctgttttagctgaggaatgcgtcttttctcttggtttcttctttgtccttattaacaaagcaaatggactttgtgctttgtgtgaaaaataatctgaaagtttacttgagttttatagtactatatttaagtaaatgctaactatggctgatatgaatgtatcaacagagagtgaatataatgggatattatagtgaatggtaactttaaagaaaataaagtgattttcgtacaaattattaatcttacatttcaacttttcaaaatgtatgtagacaaatttatttcattactttgcccctgaaaatgcctgtgaaatatctcataatccctgaggaccgtcttttgaagattctgagagaaaacaagaagggctaggactgagccatgagaaactctaaaagttacaagctgaggagaagtcaaagtgcaaaggagactgagaatttatggacaaaaaaataagatgatctggagagtgtcatgtcatagaaaccaagagaagagttattcaggacagaggataaactgtgaaatgttaccgtgagataagtaagatgaggactgaaaagagcataggatttagtaatgtgaagctcattagacatcctaggaagtgtcttttgtttgtttgtttgtttttaagtgatgatgggtaggaaagattggatcagaagctagaaaagttaaattggagtgggtgttagcatagaaactgaagaaataaacatagtgtgtagacaaagagttacagttaataagccaccaaaggagacaagatgaaatcctaaaagcactcaatctgaaagaagatagaaaaaaaagagaacaaagaacaggtgggaccaaaaaaaaaaaagcaaataacaagacgtaaacttaaagctaaccatatcaataatcatactacatgtaaatggatcaaacaccccaattaaaatacagagattttcagattggattaaaaaaacaagacccaagtataagttgtctgtaagaaatacaatttgaatataaagacatgaatagaataaaactaaatagagaaagatacacagtgctaacactaatgaagagaaagtgtgagtggtttattgttgttaaggtagatttcagagataatgatattatcaaggataaagaatgtcatttcttaatgataaagagatcagttaaccagaaacaatcctagatattttagacatccaatattagagctttaaaatacatgaaacaaaattaatagaatagcaataagaaatagaaagatacccagttaactggagatttcagtagttttctccaaataattgatggaatgagcagatagaaaatgagcaacagtataacaaacttgaacaccactgtcaactaacttgatctgcttggcatttatggaacaattcacccatcaacagctgaatacatgggttttatttttttccaactacatagagaacgtgtaaaaatatatgccatattctggcccataaaacatatctcagtacatttgaaagaattgaagtcaagcaagatgtactttctgacctaaatggaattaagttagaaaccagtaacagaaagattgtaaaattcccaaacatttggtaaataaataacactttaaggtaacccatggattaaagaaatgaaaagagaaaatagaaagtatgaaaacaacatatcaaatttgtaggatggtgccaaagcagtacttagagggaaatttgtagctaaattaatggctgtattggaaaagaagaaatgttacaaatcaataatcacagctttctaagaaactggaaaaagaagaagttaaacaggagcaaggaaataaaggttagagtggaaatcactacaacagaaaacaacagtgaagatcaatgatactgaaagctagttctttgagaacatcaagactattaataaatttctagcccagcagatcaggagaaaaagaagacacaaattaccaatattaagaatgagagaggtaacatcactacatattctaaagacattaaaaggataataaaggaatgttatgaacaactttatatcaagcagtatgacaacttagatcaaatagacatattcctagagagatacaaactgctaaagctcactgaagaaacagataacacaaatagtccaacatctgttaaataatttgaatttgcagaaaaaaatcattctaaaagaaaattctaggtccagatggtttcagtggtgaattctaccaaatatttaaggaagaaataatactaattaacacagttttagaaaatggaagaggaggtaatacttcacaactcatttcataaggctgtcagacccttatttcaaaacccatcatagaaaactacagaccaatatcctgcatgaacatacatgcacaattttaaacagaattttagcaactcaaatctaacatatataaaaggattaatacatcatgacctactgatgtttattccaagaatgcaaggtttaatatttgaacagccatcaatgtaattcaccaggtaaacaaactaaaatgaaaaactatgtggtgattccagtacatgcagaaaaagcctttgacaaaatcgaatatcgattcctgattaaaattctcagcagcctaggaatagaaaggaacttgctcaacctgatggacggtatgtggaagggggttaacgcaacaggctggggttgttgaaaccttgcccattcttaagcttgtttccatgactgtcctttgctcacctccagggaactaagctcttgaaattttttgtcttaatagtgtatttgcatgcccgagtctttgagccgtgctataccagtttgtccagattgtttatactagcaatgcagtttacggtgaagacctgccttccctctgggaatctggagcttcagtaacaggtcagtcacacaggtgctgttatgtttacatgactgatacccagtaaaagccctgtacactttggctcaaatgaacttccttggttggtaacactttgcacatattgtcacacatagttgggagaatgaagtgtgtcccatgtgactgcaccgggaagggacgcttggaaccttgtatgtggtttcttctagacttcaccccatgtgcgtttcccctttgctgattttactctatgttctttcactgtaataaagtgtaaccatgagtagagcaacttttgagtcttgtgagtcctaggaaatcatcaaccctgagggttgtcttagggacccctgacacaaagggcatcttcagaatgcctttatctaacaacttaatggtgaaagactgactactttctccctaagatcaagaacaaggcaatgatgtccattctttattcagtattctactagaggttctaaggaaaaaggcaagaaaggaaaaaagaggcatctaaatcttagaagcaagaagtaaagctgtctttattcagatgacatgatgcctatgtaaaaatctaatggaatctttaaaaagctcttagaactaataaatgagtttcataaggttgctagatatggaattcatatacaaaaatcaatgtatctctatacagtagcaacatataatcagaaattgacttttaaaatgcaattccacttacagtactatcaaaaatatgaaataagcctgaaagtagcataaaagatttgcaagatctgtacattgaaacctacaaaacattcttgaaaaaattaagacctaaataagtcgaaagatataatttattcatgggttggaatactcaatattgttaagatgccaattttctccagacagattgataattcaatgcaatcccaggaaaagaaatcaaaggaactagaatagccaaagcaattctgaaaaagaagaacaagtttggagagcaaatgctacctgatttaatgattcaatgtgaagcaacaataatcaaaacagtgtagtattggcatcaagttagggaagttaattaatggaatggaatagaataaaaaatagggccacaaacaaatgattttttaaaaggtacgattcagtgggaaaaggacagttgttttaactaatgatgctgaaacaattggatacccatatgcagaaaaatgaacgtcactccatactttgctatactataaaaattatatatatagtatataaaatatactaataaaatatatagtatagaaaaatttataaactataaaatttactaaaaatggatcatagacctaaatgcagaatctaagactacaaatttccaggtgaaaaaaatagaaaaaaaaatacatatatttatttttttgagacagagtcatgcttggttgcctaggctgtagtgcagtggtgtgatcatagctcattgtaacattgaactcctgggctcaagcaatcctcttgcctgtctcccaagtagctgggactacaggtgcatgctaccatgcccagctaatttttaaattttttgtagagatggggttttgctatgttccccaggctagtctcaaactactgacttcaagtgatctagtctaaaactcctggtctcaatcttctgggtgcagcctcccaaagtgctgtgattacagggatgagccactatgcctggctgagaaaaatctttttcaaatcttaaaatttgtatttctctaatgactaatcatgttgaacatcttttcatgtattttccatctgcttgtttttttggtgtggtttctgccagcattggttaggtacggagtctcgctccatcaaccaggttggagtgcagtggtgctatctcatcctactgcaagctctgcctcctgggttcacgccattctcctgtctcagcctcccgagtagctgggactataggcaccctccaccacgcctggctaatttttttgtatttttggtagagacggggtttcaccgtgttagccaggatggtctcaatctcctgacctcgtgatccgcccgcctcggcctcccaaagtactgggattacaggcgtgagccaccacgcctggccacaaagattctttttagctacaatgccaggactatgatcgatgaaaaaaaaaagtgataaaacagactttatcaaaattaaaaacttctgctgttgaaaacatgcttctaggagaatgaaaagataagccacagacgggagaaagtatttaaaaagcatatatctgataaatgacttgtacatagaatatattaagaactctgaaatctcaagagaaggaactcaattttttaaagtgagctaaagatatgaatagacactgcaccaaagaagataagcagatggaaaataacaacatgaaaagatgttcaacatcattattctttagggaaatggaaaatagaaccacaatactgcccatctatcagattggcaaatattaagaaaagccttaatgccatttatgaggactttgccttcatgatctaatcacctcccaaaggccccattttcatatcacattaggagttagaatttcaacataataatttggcaaggacacaaacgtttagtctataacattctggccctggcccttccctccacgaaaaatttgtgtcttcgttgcatgcaaattacattcattttatcccaatcaccccagagtcttaactgataccagcatcaactttaaagtccaacatctcatctaaatattatctaaatcagatgcagttgagcccaaggtatgattcatcctgaggcaaattctcctccagctgtgaccctgtgaaaccaaatatgtgcttccaaaatgcaatggtggtctgagtttggtggcttgtgcctgtaatcccagctacctggcaggctgaggtgggaggatcacttgaggccaggagttgaagaccagcctgagcaacatggcaagactgtctctgaaaaaattgaaaaattaattggccagacgtggtgtcatgtgcttgtagtcccagctcctcaggaagctgaagcacaaggatcacttgatactaggagttcgaggttgcagtgagctatgatgtgtcactgcactttagcctggacaagactaaagtgcaagacaacagagcaagaccctgtctctaaaaaaattaaaaagttaaaaaatatagtggtgtgctagtcatagggtagacattccattctgaaagggagaaaaaggaaggaagaaaggggtgacaggtcccgagcaagttccatgaaatcttaaggctacaaaatgaatgattggcttgatgctctgccttccagagaagtggaagtgctgccttctggaccctctgatggggttggtcacaatccctgggctttgagaggtccagccctcatgagccatctggcctattgaaagcaaggcagtggtcccttcttttgttgaaccaaggaagcatcccggatgatctctgaattgcttttagggtccttccttgtcttaaagaagagcacacatttgcagctgaattgctctatggtcccatcctgaaaaatccaagaagtctaccaaccctccttcatttcttcccatctactattttttcatttcaaattggcagttgtcctgctggggcggtccacatccatactaatcttatcaaatgatcatttgaccacaaccttagtgttgtcctctgaacagactttctcattcttttcaatatgggtaggttgagaattttctgcatctttaagtactggttcttttttgcttaataattctgtctttaagtcattctctcttcttgcgttctatttaagcagtcaggaggacccaggccactccttcagcaaattgtttagaggtttcctcagccaaatatccaatttcatcacttgcaaatgcatgttatctttataactgttacatctttatgttggagtaacccttttatcatgataaaatgaccctactttttatagtaacactttttggtttgaagtctattttgcctggcattagtatagccactccagcttttttatgactgttgtttgcatggtattttttatttatccttctactttccacctatttgtatctttgaatctaaagtgtatttctgtggacagcatatagctggatttcaaaaaaatctaatctgaaaaatctacgttttgattggattagtttactcacatttaatactattatttaattgcatgttatattattatttacatctgccttttttttttttttttttagcagagtctcactctgtcacccaggctggagggcagtggtgcaatctcagctcactgcaacctctgcctcctggttcaagtgattcccctgcctcagcctcccaagtagctgggactacaggcgtgtgccaccacgcctggctaattttttgtattttagtagagacagggtttcaccgtgttggtcaagttggtctcgatctcctgaccttgtgatccactcgcctcggcctcgcaaagtgctaggattacagacgtgagccactgcaccggcctacatctgccattttactttttgttttctatttaattattttcaaatgttggaatattcacatctatataataatgtatcttggagatagtacccaagtctaaacatgaatttatttgtttcatatatgccttttacacacagttcaaaggtaattttatataatatttttcttttttttttttttgagatggagtcttgctctgtcgcccaggctcgagtgcaatgacatgatctcggctcactgtgaccccccacctcctgggttcaaatgatcctcctgcctcagcctcccaagtaactgggattacaggcgcctaccaccacacctggctaatttttgtatttttttttttaaatagagatggagtttcaccatgttggccaggctggtcttgaactcctgacctcaagtgatccacacacctgggcctcccagggtgctgggattacaggcgtgagccaccgcacccagcctgaatattcatacataaattcttaacagtaaaaggtatgacatacatttaatacagtgaaaaaataatgtgttcaggataactaagcagtgcaatagcatcaccaaaatacctttatcagatgttaaacaacagcaacagcaaacagtggcaagctttgtctccacctatgatgctgtgttttgattaaaatgctcctatacactgtattttttgactttaggtaaaacatcagaagcgattgagggaccaagtagtggctcctataggggcgaggaagcattttgctggatggcttttaaaaatgtttcctttagagtcatctaccttattaacaatggtttttgtcttagaaatctttctttgatgttataaattgacatgaattcttgtttggtatgaatgcacactgctccagacctttagtaatctcatcacatgttttcatcatgttgtctacagccactttctctgcatggttaatgttatctttatcactgttatcaaatcaccttgattcagaaccattttaattattttaccattgatactgaatgaacaactggagcctcattatcaatattagaaacatctttgatattcacttcttccagcttactgatagactctggaggtacattttttgcatatgtcaggaggttatatatcttttttgttttcccttggatgatatacagagtccttcgaaatcaccaattgttcatcatcaacactgaacatagtcttaggccaggttgtgtcaggcacgactatgtcttcagtcattgttttccgagtgttggcaactgcatttgtggcatcctccatgctaaactacttttgaaaactttctacacccttatctctgttcactgttgctagcatgctattcaagaatatatttttatatttaccctttattgatctaaggatatcctggtcacatgccttaattaatgaagtcacatttcggggaaagtacatgttataaacattattttttatgggaatttcagctggaggatgagcagaacagttgtcaaggaataacaaaatcttacagtctagcttcactgcagtaagcatgagccgctagtacaaaatgtttgtgaaactagtcagaaaagaggtttctggtgatacatgccttttcttttccttttttttttttagcataataatggactggtaagaaatttactccttgaatacagtgaggacgtgaggttttccctgtcaaagcaagtttacacttatatgtgtattagcacatcccagcacagttattctgtctttggcatccttaattcctgtaaaggctgtctcagcagctgtaattggtgtctttctaggataataatgtcaaaacagtgatgtttcattggcattatagacttgttctagtgtcagatgtttatcagcaatgaccttggcaaactcatcaatgaatttctctgttgcttcatgatcaccgtgttttatccctacatgtctttaaaaatttaatgctgtatcttttttttattattattattatactttaagttccagggtacatgtgcacaacgtacaggtttgtttcatatgtatacatgtgccatgttggtttgctgcccccattaactcgtcatttacattaggtatttctcctaatgctatccttcccccagccccccaccccccgacaggccctggtgtgtgatgttccctgccctgtgtccaggtgttttcattgttcaatcccacttatgagtgagaacgtgcggtgtttggttttctgtccttgcaatagtttgctcagaatgatggtttccagcttcatccatatccctgcaaaggacttgaactcatccttttttatggctgcatagtattccgtggtgtatgtgtgccacattttcttaatccagtctatcattgatggacatttgggttggttccaagtctttgctattgtgaatagtgccacagtaaacgtatgtgtgcatgtgtctttatagtagcatgatttataatcctttgggtatatacccagtaatgaaatcactgggtcaaatagtatttctagttctagatccttgaggaatcaccacagtgtcttccatcttccacaatggttgaactagtttacactcccaccaatagtgtaaaagtgttcctgtttctccacatcctctccagcacctgttgtttcctgactttttaatgattgccattctaactggtgtgagatggtatctcattgtggttttgttttggatttctctgatgaccagtgatgatgagcattttttcatgtgtctattggctgcataaatgtctccttttgaaaagtgtctattcatatcctttgcccacttttggatggggttgtttgatttttttcttgtaaatttgtttgagttctttgtagattctggatattcaccctttgtcagatgggtagattgcaaaaattttttcccattctgtaggttgcctgttcactctgatggtagtttcttgtgctgtgcagaaactctttaattagatcccatttgtctattttggcttttgttgccactgcttttggtgttttagtcatgaagtccttgcccatgcctatgtcctgaatggtattacctaggttttcttctagagtttttatggttttaggtctaacatttaagtcttgaatccatcttgaaaattaatttttatataaggtgtaaggaagggatccagtttcagctttctagccagttttcccagcaccatttattaaatagggaatcctttccccatttcttgtttttgtcaggtttgtcaaagatcaggtggttgtagatgtgtggtgttatttctgaggcctctgttctgttccgttccattggtctatatctctgttttggtaccagtaccatgctgttttggttactgtagccttttagtatagtttgaaatcaggtagcatgatgcctctagctttgttcctttttgcttaggattgtcttggcaatgtgggctcttttttggttccatatgaactttaaagtagttttttccaattctgtgaagaatgtcattggtagcttgatggggatggcattgaatctataaattaccttgggcagtatggccattttcacgatattgattcttcctatccatgagcatggaatgttcttccattcgtttgtgtcctcttttatttcgttgagcagtgctttgtagttctccttgaagaggtccttcacatcccttgtaagttggattcctaggtattttattctctttgtagcaattgtgaatgggagttcactcatgatttggctctctgttattggtgtgtaggaatgcttgtgatttttgcacattgattttgtatcctgagactttgctgaagttgcttatcagcttaaggagattttgggctgagacgatgggattttctaaatgtacaatcatgtcatctgcaaacagggacaatttgacttcctcttttcctaattggataccctttatttttttctcttgcctgattgccctggccagaactttcaacactatgttgaataggagtggtgagagagggcatccctgtgttgtgccagttttcaaagggaatgcttccagtttttgctcattcagtttgatattggctgtgggtttgtgataaatagctcttattattttgagttatgttccatcaatacctagtttattgagagtttttagcatgaagcgttgttgaattttgttgaaggccttttctgcatctattgagataatcatgtggtttttgtgtttggttctgtttatgtgatggattacgtttattgatttgcatatgttgaaccagccttgcatcccagggatgaagccaacttgatggtggtggataagctttttgatgtgctactggattcggtttgccagtattttattgaggatttttgcgttgatgttcatcagggatattggtctaaaattctctttttttttgttgtttctctgccaggctttggtatcagggtgatgctggcctcataaaatgagttaggggggattccctttttttctgttgattggaatagtttcagaaggaatggtaccagctcctctttgtacctctagtagaattcaggactgtctggtcctggactttttttggttggtaggctattaattattgcctgaatttcagatcctgttactggtctattcagggattcaacctcttcctggtttagtcttgggagggtgtatatgtccaggaatttatctatttcttctagattttctagtttatttgcgtagaggtgttcatagtattctctgatggtagtttgtatttctgtgggatcagtggtgatatcccctttatcattttttattgtgtctatttgattcttctctcttttcttctttgttcgtcttgctagcggtctatcaattttgttgatcttttcaaaaaccagctcctggagtcatttgtttttttgaagagttttttgtgcctctatctccttcggttctgctctgatcttagttatttcttgccttctgctagcttttgaatttgtttgctcttgcttctgtagttcttttaattgtgatgttagggtgtcgattttagatctttcctgctttctcttgtgggcatttagtgctgtaaatttccctctacacactactttaaatgtgtcccagagattctggtacgttgtatctttgttctcattggtttcaaagaacatctttatttctaccttcatttagttatttacctagtagtcatttaggagcagattgttcagtttccatgcagttgtgtggttttgagtgagtttcttaatcctgagttctaatttgattacactgtggtctgagagacagtttgttatgatttctgttcttttacgtttgctgaggaatgctttatttccaactatgtggtcaattttggaataagtacaatgtgatgctgagaagaatgtgtattctgttgatttagggtggagagttctgtagatgtctattaggtctgcttggtgcagagctgagtgcaagtcctggatatccttgttaactttctgtctcgttgatctatctaatattgacagtggggtgttaaagtctcccattgttattgtgtgggaatctaagtctctttgtaggtctctaaggacttgctttatgaatctgggtgctcctatattgggtgcatatatatttaggatagttagctctccttgttgaattgatccctttaccattatgtaatggccatctttgtctcttttgatctttgttggtttaaagtctgttttatcagagactaggattgcaacccctgctcttttttgctttccatttgcttggtagatcttcctccatccctttatttggagcctgtgtgtgtctctgcacgtgagatgggtctcctgaatgcagcacactgatgggtcttgactctttatccaatttgccagtctgtgtcttttaattggggtatttagctcatttatatttaaggttaatattgttatgtgtgaatcggattctgtcattatgatgttagttggttattttgcccattagttgatgcagtttcttcctagcatcgatggtctttacagtttggcatgtttttgcagtggctggtacgggttgttcctttccatgtttagtgcttccttcaggagctcttgtaaggcaggcctggtgatgacaaaaatctctcagcatttgcttatctgtaaaggattttatttctccttcacttatgaagcttagtttggctggatatgaaattctgggttgaaaattcttttctttaagaatgctgaatattggcccccaccctcttctggcttgtagagtttctgccgagagatccactgttagtctgatgggcttccctttgtgggtaacctgacctttctctctggctgcccttaacatttttttccttcatttcaaccttggtgaatctggcaattatgtatcttggggttgctcgtctcaaggagtatctttgtggtgttctctgtatttcctgaatttgaatgttggcctgccttgctaggttggggaagttctcctggataatatcctgaagagtgtttctagcttggttccattcgccccgtcactttcaggtacaccaatcaaacatagatttggtcttttcacatagtcccaaattttttggaggctttgttcatttctttttactcttttttctttaaacttcttgcttcatttcattcatttgatcttcagtcactgataccctttcttccacttgattgaatcagctactgaagcttgtgcatgcgtcacatagttcttgtgccatggttttcagctccatcaggtcatttaaggtcttctcttacactgtttgttctagttagccattcgtctaatcttttttcaaggtttttagcttccttgcgatgggttcaaacatcttcctttagctcggagaagtttgttattaccaaccttctgaagccaacttctgtcaactcgtcaaagtcattctccatccagctttgttccgttgcttgcaaggagctgcgttcctttggaggagaagaggtgctctggtttttagaattttcagcttttctgctctggtttttccccatctttgtggttttatctacctttggtctttgatgacggtgacctatagatggggttttggtgtgaatatcctttttgttggtgttgatgctattcctttctgtttgttagttttccttctaacagtcaggttcctctgctgcacgtctgttggagtttgctggaggtccactccagaacctgtttgcctgggtatcccagcggaggctgcagaacagcaaatattgcagaacagcaaatattgctgcctgatccttcctcaggaagcttcgtctcagaggggcatccgactgtatgaggtgtcagtcggcccctactgggaggtgtctcccagttaagctacacgggggtcagggacccacttgaggaggcagtctgtccattcttggagctcaaacactgtgctgggagaaccactgctctcttctgagctgtcagacacggacatttaagtctgcagaagtttctgctgccttttgttcagctatgccctgcccccagaggtggagtctacagaggtaggcaggcctcattgagttgcggtgggctccacccagttcaagcttcctggccactttgtttacctactcaagcctcagcaatggtggaaacccctccccaagccaggctgctgccttgcagtttgatctcggactgctgcgctagcagtgagcaaggctctgtgggcatgggacccgctgagccaggtgcgggatataatctcctggtgtgccatttgctaagactgttggtaaagggcagtatttgggtagcagtgtcccagttttcctggtacaatctgtcacggcttcccttggctaggaaagggaaatcccccaatcccttgtgcttcctgggtgaggcgatgccctgcccttcttcggcttgccctctgtgggctgcacccgctgcccaaccagtcccaatgacatgaaccaggtacctcagttggaaatgcagaaatcacctgtcttctgtgtcagtcacgctgggagctgtggaccagagctgttcctatttggccatcttggaatggacccccaatgctgtatcttttcttaaatttctgtaacatgcctgttgagtattcagtattcttttcaattttcagttcatcatgatctttgattatttcatgatcagcatactattaagtggcatggattctctgtgatgctgatggactatcctttcaatacatgaacaagattttgtttttagctttatgtaggatttttccatttttattaacttctgttcattactttcaacatagaactttcatagttggtccttctctttcttcagatcatatatatagtggtcatttcaacaccatactcttctgtaagatatttcagacttaacattgctgtccagttgctataacagcttgactttctgttttgtagataaatataaatgctttcctttttttcttatcactgttatccacagtgatatctgcaggcctttctgaccttgtcaacagtatctttatactgcagagcagagaataagaaaaaaacacagtaatgcacatagatattggcctcttgtggggcattgtgaggaacctgccattggcgtatccagcctgtacatataccattttattaccctttgtggacatgcttgcgtgggggaatctggacatgtgaggaaaatatatattacagctgaaagggcctgggaaagtcttttttcccttgaataaactgtatattatactctctcattttgactgtgacccatcacatgaagtcaggagtagaattttccacttgtggccttatgtaaagtctcaaaaagttttggattttggaggaattctgatttcagatttttggattaggggtgttcgaactgatataattatgctatatatattatgtctatatatgttaccaacccaactatacatttttattattactttacataattatatgtcttttaaggaagctgatagaaaaaaggggagaacaagtatgtagcatctatatttaatttattacatataccatcttatttactgtgattcttcttgtggatttgagttaccatatggtgttatttccttctccaatatagctttgttcccacctgccttcttgatgctgctattgtatatttaacagttctgtatattataggcataatgatatgtatttaattaaatacatatttaaaattaaatacatatttaaaaagttgatacataatcgatatacatattttcaggacatgtgataatttaataaattcacataaaatttacatatgaaatcagggtaataggatatctatcaccttaaatacttgtcttctttatgctagaaaccattcaaactattcccttctagctattttgaaatgtacaatagattattgtaaactacagtcaccctactgatctattgaacactaggtcttatcacttctaggtcttatttcttatatctaactgtatatttatacccattaatcaacctcttttaatcagtctctccccctgcccttcccagcctctggtaaccaccaatctactttgtctcttcatgagttccacttatttagctcctacatatgaatgagaacaggtgatatttgtctttccgtgcttggcttattttacttgacataacgaattctcatttcatccatgttgctgccaatgtcatgactccattcttttttacagctcgataatccattgtgtatataaaccacattttctttatccattcatccatggatggatacttaggttgattccctatcttggctattatgtatcattctgcaataaacatgggagtgcagatatcccttcagtgtactgattttttttcttttaggtatatactcagtcgtggagttgctggataatatggtagttctatttttttttgaggtacctccataattttccatggtgactgttcttatttacattcccaccaacagtgaacgagggttccattttctccacatccttgctagcattcgttattctttgtctttttataaaagctattttaactgaggtgagatgatgtctcattgtggttttggtttgcatttctctgaaaattagtgattttgagcattttctcatatacctgttggcaatttgtatgtcttttgagaaatatctattcaggtcttttgcccatttttaaattggattatttgtgtttttttttttcttttgctgttgaattgtttgagctccttatatattattattatgaatccattgtcacattgatagtttgcacatattttctcccattctgtgacttgtttcttcactttgttgattgtttcctttgttgtgtagactctttttagtttgatgtaattccagtgatccatttttgctttggttgcagtgcttttgaggtctcacacaaaaaatcttgcccagaccaatgttcttatttccccagtgttttcttctagtagtttcatagtttcagatcttagatttaagtctttaattcattttgatttgattttttaatgtggttagagatagtggtatagttttattcttctgcgaattagatagtctttattcagttttcccagcaccatttattgaagagactgttcccattctatgttcgtggtgactttgttgaaatgagttagctgtaaatgtgtggatttatatctgggttctctattctgttccattggtctatgtgtctttttatgcaagtatcgtgctgatttgattactatagctttgtagtatattttgaagtcaggtaatgtgaggcctctagccttatttttgctcaagattgctttggctattcagggtcttttgtggttctatataaattttaggattttttgcgtttgtttatttctgtgaagaatgtcatggtattttgatagggattatgttgaacctgtaaattgctttgggcagtattgtcattttaacaatattaattgtttcaattcatgagcatggaatatctttccatttttatgtctttaatttctttcataagcattttatagtttttcctgtatagatctttcattttagttaaattgactcgtatgtattttatattctttgtagctattgtaaattgaattgctttcttgatttcttttttagattgtttgctcttggcatgtataaatgctactaatttttgtatgttgattttgtaacctgcagttttactgaatttatcagttctaataatttttggtggagtttttaggtttctttaagaataggattatgtcttctgtcaacaaaggaaatttaacttctttctctccaatttggttgccatttatttctctttcttgcctaactcttgccaggacttccaatatcatgttgagtaacagtagtgaaactggacatctttgtcttgttcaagatcttagaagaaaggcttttaattttttcccatttagtgtgatactagctgtgggtttgtcatctggcctttattattttgagatacgtttcttctatatccagtttgttgagggtttttattataagaagatgttgaattttatcaaatgcttttaaagcatctattaaaatgattatatggtttttcttcttggttctctgttgttgtgatctgtcatgttgattgatttgcatatgttgaaccatccttgcatccttgggatgtgaatcccacttgatcatggtgaatgatttttttaatgtgttgttgaattcagttttctagtattttattgaggatttttgcatctatgtacatgggtgatattggcctatggttttctttgtttgttgtgtccttattgggttttgatatcaggataatgctgtctcgtagaattgagtttgaagtatttcctccttttcaatttttttgaagagtttaagtagaattagcattagttctttaaatgtttggtagaattcagcagtgaagccatcaggtcctgagcttttctttgatgggagacataattacagcttcaatcttgttacttattgttggtttgcttaggtttaattttctttatttttcctcttcttttctttctcttcttctgttttctttttctttcttcctacaggatctctctctgttgaccaggctggagtgcagtggtgcagtcatagctcactgtagctttaactgccagagctcaggtgatactcccacctcagcctcccaagtatttgggaccacaggcacgtgcccagctaatttttaaattttgtgcagagacagagttttgctatgttgcctagactggtcttgaactcctggccataaatgatcctcctacctcagcctcccaaagtgctgggattataggcatgagccactgcacccatcctattcaagttttctatttcttttttcttttctttttttttttttttaagacggagtctcgctctgttgcccaggctggagtgcagtggcgcaatcttggctcactgcaagctctgcctcctgggttcacgccattttcctgattcagcctcccgagtagctgggactacaggcgcctgccaccacacctggctaatttttttgtatttttagtagagacggggtttcaccgtgttagccaggatggtctcgatctcctgacctcacgatccacccaccttggcctcccaaagtgctgggattacaggcatgagctactgcgcccaatccaagttttctatttctttatgatttaatcatagtagattctatatgtccaggaatttatccatttcttctaagttttccaatttgttggcatgttgtccataatagtctctaataattctttgtatttcttgtggtctcagttgtcacctttttcatttctgattttatttggatgttctctgtttttctttttttttttaaatatatgcacacagttttatatataatgcagcatcacaccatgtagggcatttactcttattttatacattcagatatgtttgaaacacttcttaaggctacaaaacagaacatagaaaaataaacaggaatatattcaacacttacaaaaagtgatatgataaagaatataaagtactagtttccttttaacacttcaaaagatacgtatatatactttttttacaagtaacatcacaaatgatcacatcttcacatgctcttaaagtattatttgtactcagtgtaaggctattatcgtttttcatacacaaaattttcagctctgtaacacaatgcaatttttaatccattcaagtaagttcaaccccaaagttgctgcttcccagcattaagacatgcacccactcctcttctaagattttctaaaacttgtatttcggggagaaagacctcttttaaaaaataatcccaattagtgggagagtaaatggctgacactagtagcaaaaccttagttatttgaaaataacatattggaaatgagacattattaggattctaaacaaaaacaatagcatttagacataaagtaggaagcaaaacacagtacacagaaatagtgtagccaaatacgtattctcttcagctacactagagtggaccttgcttagtatccttaagtaaaagacaaaacatttacctcatctaaaaatgaagggtaaaacaaaagaggccaaaataaatattgctagtttctaggatggctgaatgttttctaaaccagaaatggttagaaaggaactttattgcaccaagtcaatcataagcaagtttgcagttcacaggcattttaattcaaccttgagtcacaaaggaaacaacacactgcaagaatacagtctgcattaaataagatatatcggcattgtggtctgggaaacctactcttgccaggacaaggcagggtctgagcttaggtctgccatgaaaatgaatttgtgggttatcagtaaacagtatgaggactacacagatgccagcatcctgctgccaaggagacatggggcaagagttgaagatttatttgagaggaaatgaagagacatacacaacaccaaagggaaaagggggctggaataaagttcagccaaagcacctaacacaaaaaacaggtgagctttggtcagtctgttcttcaaaatatgtatgatcataatatggtgaagtttcataatttccaactcaaaaatgcaaatgatcctcagttctatacttttgcctctattctcttataaagaaatatgtcaacatacagtatgacataaacagttaaaatgaaggacaaaagcttgcttagccttagtttgacctcagcataaggcaaaatcccgtggactaattaatacatttaaaaacaaacttaaaggataaaagcgaaaccaaccttcatgcaaagattaattttaaaactatcaaaagtcagttcttttattccggaggtcactgagaaaagtaccatctgctaaaattctctttcaagcacttcttccatcatatcctagaggtgagatatgggaaacagaaagcaaatcagtgtttccttcaggagctatatattctgttactcaattgaggtaagacaaagtgacaatgaagatatgaatagtatttccttccaatttttaaacattttcagaagctgagataaaaccccagtcaataaaatgcagcaacaacttattttggactcctgagatcaaacacattgaactttcaaatctggtgtttctatcaaaatgtgattttcattaaaatcaggtaagctagtcctacaaaaaaaagcataagctgaaagtggaggaccctctatcttctcattccttaactgagccaccagtgttaagaaagaaatggcttaagcggtaccttcaacaactattctagtttagaaggtgacaacaaattcctttcaatagattctctcaaaaaatgttttccacacaaccatcccagtctttacaattttttacctagcaccatcataataaaatgttatctttcaaagtgctctctaaaatcctgttacattatctaaatgctaatcactactcaaatcagcagttacacggacgttaggtaattaaaacagcacagaggtaaataaccattattacagtacagtggcgattcactgagcccagctggcatccaaacattcccataggttatcagagaacccagaaaactcatctgtttcagtttgtcaaattcaagtgaattgtattttcttaagtaatttgctttacaaaaaaagaaagtcaccgcatctggttttggctaggtgtattacacatggtatgcaaagagaaattactactatgttatttgcatagcactcaaacttcctgatcagaagataatctcaacataataaaagagtggattttcacattggtatgtacaaataaggaatataagctacagttatttttacaaaataacacagatgaatgaatactgtgttaattcagagttcaatctccaaatgaggacagagtacaacatgcaaagggaacctctagtgaatactgcaaagactggaagaaagcagaatggaagatgttacctacctaagggtaacaagctataaaatacaaagcaaaaccattttctagcagcatcctctagaaaagaactagaagtcacaatcatattatcttctatacgatagttccagccctgacaaggagaacatgcaagtgtaaagtgaaagtgatacataaccaatggtgcaaggggaaaaaaaatacacacacagtaactctagaaacctgtcaagctaaaaatttttaacatttcttctcacaaaatatttagaatctgtcagtgcattagtgttaaagtggcatttagaaaacttctgcagttctgactgatgcagattattttcaaaatgcgtagcatctacatttctttcgagtaggcaccatgatatttacaccagtgctaagaattcttggtggaaacagccatttcattggatttcctactatacttctgtgcaatctcaacaaataccaaaattcaaaaatataccttatgaatattaaaagaactatatacaacattgctaagacacagttaataggctgccttatgtgaatattaaagagaagacattattcaagtttgacagatatcgagatgaaaggcctttgggttggaagcattttaaaagacaacagtgttttaggctgagaattgtctgagcccagtttatgactaaggcattgcataataaaatagacatttctatttggtgcaacgttatgtttggaatctatagtgtgtcaaatggtgtattttcttgtcactttagtaagcactataaagcacacatttccaacatttgaaatcagacttataaacttataaggaaaaagccaaacactaaatctataatgttttatattaagctgcttataaaaatactttaacaaacatctgctttttacgaggacagtcacttgatagataaacagattctgaatgaagaaaaccggcaatgccaggaattaacctgcccccttgaactcatgtccacaatgtcttgtcgagtatgggagggaaggtaaggaggctggggagaggaaagagttccaactggggtttttactttattgtagttttttaaagccttcagaaacattccacctaagagtttctgttagaaaatacttcggcaacaaccgtcaagcgtgctgtcccctatggccatctcccatccctgatctcctcctatctcccctaaatggtcgccctctgacatttcgatggtactgataaccttcatcccgacttctgcttggctgtcctttccaggactcctcacttctcacatgttgatatccgcccctaccagaatagccccaatcacttttgtacttcctgctcccataagtttgattatagaactgcttggatctaccacttctcaaaatatgacacttcattttcattttctgaactctcttcttttggtctttgcactctgctatccacagagttggccccagggctgaccacatcagcagcagtcttaggatcttttactttttctgttttttctttcagactttgaatggtccttttaggttcaagttcaacaggcacaatttctctctctctctgtttagaatctgagtgggagggtgagcctttccctctgctacaggagggatggaagccaatgccatatctgcctttcgtgtctgggaagattgctctgtccggccttcgtctggcttactgctcacacttgcttcagggagagaatgtacatgttcactcctggctgctggaaactcatctactgtggaaactgaaccacaatctttagacagatccagattttccagagacagatccaattctcctttctcatcagagggcaggacaatattctgcctcattactggattttctatgaatccctgaaaagggtacccatgccaaacatgaggaaagaaaggaggtgcaataggaactgggcctaagaatggattgggtccaaaagatggctgggggaacatattcttgccactcagtgactcttcataatcagcatgcagaagctgcccaggggtctcagattcaagatcagcctggtaagacaattgtccgtgactttcagacacctgagatggagggataaccagaggtgaagaaaatgtcggcggtccaatcactggctgtagcatttgaccattaacactagcctcagtctgcataggaaagtgggcatcagtacaggtacaatcactttaattctgggcggcaggagcctctttgaaccagggattatgaagataaacagggacagggacctttgggtacatcctgcaggctgccaggtaggcctggtgcagagggtacaggtaagaatgtggggcccacacaggacaactgtatgccttcacaccaagattgaagaagaatcgaagaatattcttatctttaggtaggtcctccccagtctgacacagtgaagaaggtggtacaatggctcgatctcccttttcattacaaggaaacccaggatagagtgggtcttgataaaggctcaatgtctgaggcaaaggcatcaagggctggttaactgcctgtattgacacaggaactggagagggtgttaaatgagtttgggatacagcagaatcaggtccaggggtcaaagtctgtgtcactgaccgaccaggaattggagcagggacacctgttggtccaaaagttgtaggttcacttggccaggctggcacagtggctggtaaagaaggcactgcaggagttagatgtacctctggagaaactagaaggggagctggatttgacaaagacacatgttctgctggcttttgttctgcaggagaagggcactctaacttctttgactttgatggtgatgaaactgttgcatatttatcatcagtaatattctccaatatgcttggttcgggtcttttatccaactatgtccatgaatagagtctttgtcttttcgttcttctgtatccattctccgcctgcttccttttctatcacttacgtgtgatgattttctctggacacatggattgctactctgagaagtagcaatagttagattctcgacttgtgtgatcagaatcctcaactctttcacgatcaggttttcttatgatctgtgaaggtgtccggctaagatttttgtgctcactggagaatttctgagactgtgaccctgaagaatgactagagaactcacgttgtcttactcctgaaggatgctgcagtcgaggaggtagtgctaatggggcttttattggcttgcttggattctttggccctctgtaatccatatcagaatggaaattttgtccagaagtggaaggttttttcatcttcttccctgacactgtgttccagctttctgggggaggtgccttgaggttctttgatgtgtactttcccagttcttcaaccaaaactggtccattctcagaatgaactccttgaacgtctgcattcaaaaattttccattgtgatccaacctaacttgacatttgtctccaacttcatattgtaagccagcagcaatggaataatcacgtttttgctgagcttgtttagactccagccaaatttcatattccacatttctatagactgcaggattgagtgacttaagaacctttctagccaaaggcaggctagtagagttcccattgttcttcagctgctcgttgcctgacaaaggtttaaatccattcacatcagcagcagcaacagcagttttactcttgcagctgtcatcctctgaatctgatatttcactgttgtcttcatcagctacttccaacgtgtctagttccatcacaattttactaacatcagttttaaataccttctcatacagcaattcataaaggagagactgacacatagcagagctttctttatactttacgggatacacaatatcataatgatttccatttgaaaaacacagtaacaccttttcaggaaaattattttcagttacttgtgaaggagaaacattaggttccagattagttataaaatctttcctgtacataagagaaagggcacttatttccatttgtcctacccattcctgtggattttccaagcgctttaaatatccttcaaatgatcctcctataatcgcttcaaatttctctctgttctctcgaagacagtgaatacaggccattctgacttcaacatggcgagactgagagtgcaatacctgctccgccacggcccggaacaggcacgacccgtccttggcgaccagtttccgatacaagcccagtttccgcagataggcgtccatgggcgtcgcgtcctcgcggggccccgcgccgccctggtcctcgccgtcggggacgccgacggccgcctccatgttgctggtcctgctgcaggccaggcgcgagggctagccccacatggccaggccgccggctgctcgacgccccggcctggggtaggcggcggctcgggctggggctcgggctccgcgagcggcggcaggcggcaggcggcggcggcggcccgaggcagcggtccgcgctctccgggcgcgtaggggagccctgcctaatgcatggctgtccgtacgcggccgcctcctcggagcgaacacgcgcccacgacaaacggggggagcgggattaaggaaaaccccgagagtgagtagtcacttcccgacggcctcgctgcccgactcaggacccaggccgggggtcgccgcccccacaagtttcctcgtctgtaccggtgtgaagcgagaaaagccccgccccaggcgcgcacgccgggccggctcaggtgaagcggggcctgcgtcccccgcgcgctccccacgccgggagccgaggaaaccaaaaaagaaagacgcggcctttcgtttccccaccacgctggagggcgccggaggggcggggagcgggtgggggctccccctggatcttctctttttttcttagccttgctaagactaagaattgtccatttttgtttatcttttgaaaaatgtggctttttgcaccattgatcttttatattgctttttaagtctcaattttatttatttatgctctggtatttattatttccttctgttaattttggatttggtttatttttgcttttctagttccttaaggtctgcattgttagattgttgttttctttttttagaagtgtacttttttgatacagctgtttattgctataaacttctcttttagtactgcttttgttgtatcccatagattttggtattttgtatctccactttcatttgctttaagagattttaaatttccttcttaatttcttcattggctagttggtcattttggagcatgttgtttaatttccatgtttttgtgtagtttccaaagttcctcctttctttggtttctagtttcattgtggtcagaaaagataagtgatacgatttctgcttttttgaaattgttgagactttttgtggcctaagatatggcctattctgaagaatatttcatgtgttgatgaaaagaatgtgtattctccagcaattgagtgaaatgttctgtaaatgacaggcctatttgatctagtatgtagtttaaatctgatgtgttttttgtttttgttgttgttgttgttgattttctggctggaagtccctttttattatttttttaagtttcttacttttgctgtattgcagtctacccctcactttaagtctattaatgtttgttttatatacttaagatcttgggtgttgagtgcatagatatttataattatgtccacttgcttcgttgaccccattatcattatttattgaccttctttatctctttttacaggacttgttcatagtctattttatctctttataaatatagctactctttgctcttctttgttttccaattgcgtggaacatctttatgccttcactttcatcctcatgtgtgtctttataggtgaggtcggtttcttgtaggtagtatatatttggatcttggtttttttttttcttcgccattcagccactctgtgctctttaattcgagaagcgagtccatttgcattcagggttattatttataaagtcgtccttactagttcattttgttgcttattttctggttgttttgtaactgctctcttcctttcttacatcttcctttctggttaagtgattttctctggtcgtatgttttaactcattagtttttatttttagtgggtctattataggtttttgcattatggttaccgcaagacttacaaacacatcttgtagattcaacaagttgtactatagagagattagagatctttgtaatttagctgttgagtatctttttttacccactaggcctgcctccttttaagcactagatggtgccttacgctcaggtttttctcagctctagtaaataattaggacactgcccatgctgagtgggagaggtaccagagaggttatcctggcagtgcgggaaggctgacttggagtttgtgcctgggaaacctgtggagtgaagctcctacaatgtggtgttgctgaatagccactctgatttggtgtcgtctcctttgattgagttacagagcagtttccagggttagggattgtagtcctacttgactcctttgtctctggctgttttcagggatagttctcccttcaggtactcccagtgcttcctgtagattgaggtagggacaggtcttctgtcagggaacccaagatggtgggaaagctggttggccaccttaatctcactttttccagtgtagaaatcatgaatcaggggaaagttttctgtatgcttgatgctgggctgattttgtggtgaggcatcgtgggtgaggaaatccaattccgttactgtctgctcagagttttttcattcctctgtgtccctgggaactgtctctccctacataatatttgcattctgggatattgctggcgataatcttggtgctgtgtatttgtttttggttttctgtgggggcagggagcaaagccagctttcttctgtgccaccatcttggaactggcagttcatgtattggtttatgtagttacttgtaaatcagtcaagagaggaaaggagaaatcagcaattataccttttaccagcgctcttttcttttttatcccccatggattattacgaatgcctagtatcatttcagcctgataaacttcctttattatttcttgtaaagcaagtttgctagcagtgaattctctcagtttttgtaattgtggcaatatctttatttcaccttcatttttgaaagatagttttgctagtataagattcttggttgataggcgctttttttttgtttgttttttactttatgtattttgagaatgatgtctcctaacttttggcctctagggtttctgatgagaaaagtcagctgttaatctcattaggattctcttatatgtgatcagttgtttttctcttgctgattttaagattttctgtttgtctttggctttcgaaattttgactttgatgtgtctgcatttggatctctgtgtttttcccttttggaatttattgagcttcttggatgtgtagatttatatctatacacacacatatatatgtgtgtgagtgtgtgtatatatatatatgtgtgtgtgtatatatatataaaatttacaaatttggatagttttactttctttaaagtttttcctgtgcctttttctctctcctccgcttctgatactgtagttatttatatgttggtgcacttaatggtatcccacatttctctaatgctctgtttatttttctgcaattttttctttcctttcttgcatttcatctgttacataatgtctattaatttatgttcaagtttgctgatattttcttgttcacaaatctaccactgagcctttctagagtgtttcattttacttactatacttttcaactccagaatttccatttgattatcttaaattatttctctctttattgatattatttatttgatgagacattgtcatcataatttcccttaacctgttaagcaaagtttcatttatgtctttgagcatatttgtaataattgctttgaagtgtttgtttgcccagtctaccacctgtgcctcatctagaggcagcttcttttggttttctatgtgtattgatcacatctttatgaagtttttttatgtctcataatttttttgttgagaactggatattttaagtaacatagcaactctggatactgatccctattgtggttgtttgtttggttattggtttatgtgtatataacagtgatatagctgaacaaattctgtaaagtccattttcctcacagtgtgtagcttctgatatcccagctcagacttttcccctcttaacctgactacttatgtggcatttctggattggcatagactatgtactggtcacaggttgtgcttacattccctgaggtaggtagatttttacccttaagtgttaaatgtgtgtgtggcttggtggctgctattatagttcagggagtttacatttttttttgtcctgcatttagccaggtgctagaagcttggaagttagttcctgagagggcccaaccttgagcatgtacacagtgttccagactgtcagggatgacagtgctgtttcatttaaccctggcttcataggaattacccctgggtcagagtagcttctgttacgtcgtgtttggccagaggtggtgattcagacccttgtgccaatgaagtttctccgctctgtcagtgggtacgtgtatagcttagagaacgttttcaagactgccccacgttctgccctgatcattcctgggtgtacacagcctagtgtttttatactgcctttctgactcctctctgatctaagagggctcttcttggctgtctctggttctctgcattaaacttctgcttgctctgcctttctgcttatattggagctcctagcctttcttaattgtttttcattaatatttccactgttttctttctttctttttttttttttttttgagatggagtgtcgctcttgtcgcccaggctggagtgcaatggtgtgatcttggctcactgaaacctttgcctcctgggttcaatcagttctcttctctcggcctcctgagtagctggaactacaggtgcacgccaccacacctggctaatgttttgtattttttgtagagttggggtttcaccatgttggccaggctggtctcaaactcctggcctcaggtgatctgcccatcttggcctcccaaagtgctgggatcacaggcatgaaccaccacacccggcccactgtttttgataatgcccttaggcatggggttctgctctctgttccaaataaagtcagtcctctcagatggaaatgtagagctctttgtccttatggctcgtctttacccctgagcaaagtctccatgccactgctcctggggctgaaggtgagagtcttttttccccagagtaacactccattcttagagtgggcagtggagtgctggtagcagcccttggtcttcttagctgactgctcctggcacaaaacctctactctgggaggaagttggggcggtggcagtcagggcccagtatttgcagcctgctgtacctggaatagaaattctaccttttgaatgggggctgtgtagggaaagagagacgggtcctctgtgtcacctctccagaacagagcttctacacctctgggctgaaggagaggagaaacaccagcagcctgcccttcccggggtaaaactagccacagactggaagcctgagggagagggagccctctgcctgtcttttgggtacatataccgcaggtagaggcttcataatacagacctggtaggatgtggggaatggtgcagtttgtaactcaaacgccacagactctgacttgttctgagattgagtacattttcttgaatgaatgtttctccactttttgtatgcccttagtacagtttccagagactttaaatgtttgttttttaaaaaaattttcagcagtttttaatttttaattaattaatttttgtgaggcagggttctgccgtgtcaagctggagtgcagtggcgtgatgttagctcactgcagcctcaaactcctaggctcaagtaatccttccatctcagcctctcaaggggctaggactataagcatgcatcagcatgcctgagtaatttttattttatttttttgtagagatggagtctcactgtgttgccaggcttgcctcaaactcctggcctcatgcaaacctcccttctcagcctcaccaaagccctgggataacaggtgtgagctaccacgcccggcctactagtttttaaaatgtagttttgccagttccactgagctccttattctgtcattctggaagttctcgttcatttttaagcttttaagatcaggtttgagatcttctttatatgtagaggcaaggaagttgttattaccaaatatgatttcctgaagatactatactcatgctaacaaaataaattatactttgttgtagtaaactaaaatttatatcagaaaacttgaaaccagtctggaaggcagccttattttccttatatagaccaggattttgactttaaactcattttccacacagcttttcaatttgatgattcagactgactgttcccaggctctgtaaataaagattctctttgtaacagataacattacggacaggctctaccagcatacccattgcccttgaaactttacaaaatgctttgccgctttgtactagctttttcttcttcccagcctgcttctaattacaaacaggaaaatcagacaggatatggcattgtgactgaacaagttcattcatctaacattattaaatacctgcttcataaccgataactggtgaatattctttttattacctataaatgtgtcctagcctagagccattcttactatggttgcgatattttaaagttattaatttaaatttgacttaactctttgagcataattatgcaaaatagtcatttctttggagagaaaacttactgtagaaaatggaaatgtttaatcttataaaatgcatctttttaaagaaacccagagcatctgtgaagcaaagcaattaaactaaatgttagcaacataggagaggagaaataactgtccatgtgtgaaaaggagacagtggggcttggtaacttaggggaagaagtgatgttcaggaggccttaggtgttgctttaatattctctgtactgctagctgtgaatctagacaaaaaattgtattattctctgcttcggtttttttcctgactttaattggaaaataatcacttatctctcctgcacattggattgtggacgaaaaaaatagtgtaatttgataaggaattgtataagatttgaagtgctttaggaatgttcaatacaatggtacctgtcccacccaaagcgatttataacagaaagctctgaaaggatgttgctgaaacactttcatttataacctggcctaaagcgaagtcttaggtaaggtgttttatagcggagcacacatgttatatgtatgctgtataaagggaactttcctattttctattctcttttctaatagagaaaagatagaactcgtaaggcaaatatttttcttaactattagctccaatctcattcttccaaatttttctggttattttcagaagaaaaactaaatttaggtcacactttctttccttctctctttctcacagttaaatggcccaatgaaatgaacattaataaaaaaaagcagtaggaattgtgaatagtttactggacagtttggtcttaaactttaaatcattgtctttattatgtggttaaaatatataaggtaaatagtgggtcctaaaccagaaggctttgatcctagggtgttctatttttcatttcttagaagccaaccaaatttaaaacatgaagaaaaaaatgggaaataatcataaagcattgcttgagtttccaaacatatataaaaaataacaaacccccttcattgaggtcaggcactgttataaatgaacttgtctcgttcatttataacattgtctcattcatttataacaacatcccaatgaggaaggagtctatcatttttcattttgtgaagagccaactgtggcctagacaaggcaattgaaacttattccaggttgctacagcttctaaaaataggatggacattttaaatgatgaaattaaaaggcaaatattttctaaattacccagtagtacatattctttgttaaaaaaatcaatgatacaggaaatcaaatttttaacaaatcatcaataactctatatgtttttatgtgtgtataattatacacacacaaacagagtgagagagagagagagatctgaaagatatgcagtgaaattatagcattggctaaccctggagaagaaaagtgagaaggtaccaggaatggaagtgatggttaaaaaagtctttagctttattttgaaagttctgattttttgcaagaagaatattttttatgtagtagttgtataaacttaataatttaaaaaccctcaaagaatgaggacaggaagccaaattccagattgagtttaattttctttgaccagcctctttgtctcctttctagagacttcttcattacaatacccaaccaagaatgtttaaaacttttcaaagataatgcatatgtgagttaattggtatagctaaaattatgaaatcattgataatgaagtataagacagtatatgacggcggctaagtgcgtagaccctgaagccaggatgttgggtttgaatcttgacttccttgttgtatgacctctctatgccttagtttcctcatttataaatttggggtactgatagtacctgtctctaggttgttgtgagacctaaatgaattttcatctgtgtagtccttagaacagtagctggcacgtagtaagtaatataaaggttactattattgttattgtatcctgacacttagaaaaactggtggtagattgttatatatacatccagacttttttctatatatgtgtgtaaacatttacatacacttacacagatacaggcacgttcacaggagtaagtatatttttattaaaattggattatactatttctatttttttgtaatcttttacactcaacaccatataaatatctttctatgccattaaatgaaatgactgtttaaaataaaaattagatgcatttgatcttaaccagcgtgatagcatgggtccttttgaccaaatacatgagcataagataaaattgaaaatgcttggggctatgctgaaacctgaagtgcttattgatgttgatatagcttacttaaatggttgaatagacactggcatattctacctaagattattattacttgcctaaattgttaagcaatgatgtccaacatttttaatgtttatcttcagagccaatatgaaagatagaaagctgtttttaaagtgtcatgggaggaaagacacttgaataccactctttgtaaagaagtaaaatgatctgtaaaaagtatacttgttattaatagaattatttcttcctccacctccttctggcttttcaggagatgtttcacaaagcagaagaattattttctaaaacaacaaacaatgaagtggatgacatggacacgtcagatacccagtggggctggttttacttggcagaatgtgggaagtggcacatgtttcaggtacctcctttcctttaatttagcagaagtgttttcgattcacttagcatcaccttgctgatgtatgtaaaatgagtataaatatagaacttgaagtcaaagcttaaggaaataaaattgtttaactaaaagaaaagttagaaattcttccagtgcttttccttttcttttccccaagttttcacactcatttatttagaagaaacaatagagggtgaatgtgactgagagttgcatggtgtcagtacatctgagcaactccaagtttggtttggtggacaaagagaaagggaagaacaaatccgtattaaacacttctgtatgccaggtattatgttaggtgttgtacattgattttctcccttatcctcacagtaacttggaagcagatgttaacattctgtcttacagtcaaggaaagtgaaactcacaaaagttgacataatttgtcaagggtcacacagctagttaaactgagatttgaatccgcactcaaaacctgtagtcttttttttactctactaaactatataaagaagatttaacttgagccacttagaaagtataattattggaataatctgtaaaaattgtaattatctggaaaaataactatatttctatatatatctgttattgaaggggactataaccagttgtctcttcactggagatccttaaaccattttcaatatgctggcttagttgtgattctccctgtgtgttgggaactagaacaggtgattagtaagtttccctcgcccctccattccctgtctctatgaccacagtaccacctctgtggccaagtcattaatgtgaacagctggtaaatgaaactttctggtttgtcttaaagccggataccaacagtcagtgttcagttagcagtgaagatatcgaaaaaagcttcaaaacaaacccttgtggctccatttcttttactacttccaaattcagctacaagatagactttgcaggtatgtttttttccctaatagttgtgtgtttttagtatattgatatgataaaatctacagctctgaaggtcaggattagttgatatatttgcaaacagtgaagtatatcttttttgttatatacaaaaatacctctataaaaattcaagttttaaaatcttgagcaacattgccttttataaaaggtgtgtttatatgtttgtatatattaatgtatgtgaagattgtcttatatattaagtgcatttaatacttgtcttctaaggaacacaaaacaccgtatcagttgttttattcatcccatcagtcttttgaaatagataagaacatttaagaacatttttactttttttttttttttttttgagacgtctcactgtgttgcccaggctggtgtgcagtggcatgatctcggctcactgcagcctccgcctcccgggttcaagcaattctctgcctcagcctcccgagtagctgggattacaggcacccgcccccacacccggctaatttttttgtatttttagtagagacagcgtttcatcatgttgacaaggctggtcttgaactcctgacctcctgatccacccgcctccacctcccaaagtgctgggattacaggcgtgagccaccttgcctggccagaacttttttactttaaggatcaaacagatgttaagtgagaaagtcataggtagctggcaatagtttcaagaacaacttttagctgagtgatctttctctcgatgtctttgtcagaaaacaatttctttaatggacattgccttctgtcattttctgattgatttggctcttccacagattagccagataatctggaaatcagccccactttggatttcatctgtgttatatgggcatgttttggggtatcccatgaaaaacctgatgaactgagctcctcaagtttcaggctgttagtttcagctatttattgcttagaggcaaacaagacctggatgggaggctttcttaataaaagtacattttgtttgctacacagcttggtcctttagctgttctttctcaattcctgtgagtagtgtctttatgacagtgttagtagtgtattgtggctgggtagggtggtgaaacgttaggaaatccccttggatgaaccaaggcccagaaacagtgaaggggatttgtccagtaagggattgatggaaccaaatatgcaataattattatcccaccaaagttgtttttcttgcttttttttttaattatcaagagttaaaaaccattagatccttgctcgtgacaagccattttttttttaatgccattaggcaaataagcaggatttaagaggccctgacatttgtccctctgttgcagtctaggcagaaggtatctggtaggcatttttagtcatgtgtacaagtatttttgaggaagaactgaaaccgaatgatatgcacagacaccagacctcatgtagaggatgaactgtatcaaagcatttgataggtaattcagcaagccacatgtttctgaaagaatattttttagtagactacactttttggaaacttgctctcagaaaaaagagtttattaaaaatatcattattaaggaatgggagttacatatactaataactggagttccccaaccctctgtgtaatgatcctgtttcagaggcatggatattagcatttcacatgtactctttgcagttatcagctccaaccattctgccactagccaactcaggttttctctataaaaatggtgaaaagtaaactaaaaaatgagatggtccaagaagatggcatcacaggtcttgctccacatgctgagatgatcttgctttttccctgaacagtggtaaatccagtatgtgtagagtctaggagaacacagaaaggacagaacacactttatactagccttagcctgggtgggtaaacataatcattttgaaatggaatgatgtcaattagatgagataaactggctagaatcttacattaagaatcactacttaactttgaggaatgaagaaatggacctggtaaatattggtatgactgaggcatggatgaaagcagaaaatgatacctttaagtacttagtctcttatcactagaatctttttatgtaagtttgtactgggtctagccaggttttctattttttaggtttagttatataattaaagagaaatcaggaaatgtagaaatttttgaaattctgtgagttgtacaagttttataatcatttccaaaatttttggagagatgaaagtacatttttcttcttaataaaccaaccacatttaatactgtaatttctctctttctagtactcttagctttcctaagtttagaactctcctagtttagtgtctgtttaacctaagtgtgatacagaaggggaatagaccgtgcatactgagcagtggatgaaatgagcatctttatgtgtgagcttacgtcaagcaatgaagctgtgcttccttgaataacacctccacaacgtggtacatagctagctgcatggtaaagtacccataatacactatgcttgccagctactcccgaagctccatgattcctgatcatcgcgtagcgtggctattaatcttcatgacactttatagtacagtgtacttttatgacttatctaatatcttgtctttgtatacagaaatgaagcaaatgaatctcaccactggaaagcagcgcttaataaaaagagcccccttttctatcagtgctttcaggtatggtaaagagaataggggtggaaagagtgggttttttttttcttactattggacagaaaaacaaatagactggaaatattttggtaggtcatttaataatattgatcttttaaatatcaaatcttgggccaggcgcagtggctcacacctgtaatcccagcactttgggaggccgaggcggcctgatcacgagtcaggagatcgagaccatcttggctaacacacggtgaatccccgtctctactaaaaatacaaaaaaaattagctggatgtggtggcaggtgcctgtggtcccagctactcgggaggctgagtcaggagaatggtgtgaacccgtgaggcggagcttgaagtgagccgagatggcaccactgcgccactccaacctgggcgacagagtgagactccatctcaaaaaaataaactaattaattaaaaaaatatcaaatctctcatttgttgacaaaatagcaacattattatttactctaagtgcttcctttcatgttatccttttccttcttgtatatttacattttttaattctttagaacagtttgcagttacaaaatgccttatggtctctgctctaaactcataaaataactcactgaggtaagtttaaattgttaacttggacgtactctctcagagccatacaattactggggccgtaagaattaggtagttgttcactttgtttccacctacattgatctccattggtcaactcctagaagtaatttcaaatttgtagagactaagggagccatagggaagatggtagaacagtggacaacagtattgctttctgttccctggaacttggttacaaattttcttttttgcttgctctggccataagaagtctgaaaaaggaggtataaatgtcagaagacaatacatatttattattcatgtgaatgaatggacttgaaggaaaaaatcttaaagcatgtctcctattttctaaaatgactcttcaagcaagtattgaaattcttttttgttcaaataatttaaaatgaaactggaaaaaaaaaaaggtagcatgttaattgcagggaatgcctatttgctccttccaaggagatttttgaaaggattaaagaaagaaatattttaagtttctgtcagtttgtttctcaagacttttggttttattttagcatttattttggttttattttagcatcacgatataaaagttattccaagtacttataaaatgaatgctctagtacttctgtggaatatagagaatagtatttccttactagctacgtcatatccacattctttagtacaaataatataataaaagaattacttatcttcagaaagtatttaatctgggagaaaaatgaaaaatgagacataataatggaagatgttattgtaattgtacattgtatctgctgtgctttggtggagacaagaaacactgtgatgggatcaaacactttgttctgtcacagactgtacaaaccatagaacaaagacagcacaaggagagaactaagcagaatggaggacaataagcaagataataataaaaggagaggactgtttaggtaagatacaatagggtgttgaaggtcagtaggtgctgatatagaaatatttatttactgtgggaatacattgagcatttatcacatgcaaggtaggtaatacatgcttcctgttggcaaggagttctttaaggctgttgactacataaaaactaaaaaaattttttggtcatagctaaaagatactttaggccaagtgtgttttaggcatttttttccctcacagaaaattggggaaatatttttattcattgttgtagttgaagggatattctccatattatatgaagtacttttaggactctctaaatagaagatcaacatgggcaaacaatttgaacagttcatacaacctcactcataataggagaaaaacaaattaataccagactaatttttactaccagattgactaaaattcaaaagtttgatcacacacctttttggagtggttgtgggaaaacagatgatttctatatttctggtgagaatgtcagtaggtacattcaaagacagcatttggttggtgtctgttaaaatcatgaaaaaatatattctttgactcagaaattctgtttcaaatatgttattttacagataaacaagtggacatgtaacatgacagatgaacaaatgtgttcctgtagcattttttttttttttttgagacagagtcttactctgttgcccaggctggagtgcagtggtgccatcttggctcactgcagcctccgcctcccaggttcaagtgattctcctgtctcagcctcccgagtagctgagattacagccgcacgccaccatgcctggctacttttttgtattttagtagagatggggtttcactctgttgcccaggctggtctcgaactcctaagctcaggcaatccatctgcctctgcctcccaaagtgttgggattataggcatgagccaccgcgcccagccagctttcttaatgcagtagcaaaaagttggaggcaagctaaatattattatggtgtatccacatggcggagttctgtgcgtctgtaaaatagaatgcattcattcattcatccagtacttactgagtgtgtactatgtgccaggctctgtcgtaagcactaggaataatgatgctctctatgcactgttacagaaagatctctaagaagctatgaagtaaaaaccaaaaaaacaggtgcaataaatgtatgctttatgctaccatctgtgtgagcaaaaagcttggcttgtattaacctaaagaagctctggaagaatacccaagaaactaattaccaggagatggggcaaaaagtgagacttggacataccagggactggagtgggaggaaaacttctcactgtatatttcttcacacatattaatttttaaatcacctatttgatttttttcattaaaataagtttgaaaaaagtaaactaaagatcggtttgaaatttattaatttatttagtaacctccaatcactggaggcgattggtgtgtcatgttcagccttttgctattaaatccctcaacatcactgtttttctgtattcacatcgggtggcttgaacatgtctgatagtttttaagatttactgactgactgtgctaataacccttaaaggtagtggactgttggagagaatagtgggcaattaacagagaagggtttaggtttgagttagaacttggagaacatcgaatgaatggttgaggagttttgattttattcaatagacaatataaatacgagtttcagccttttgttttcatcaggagcttgattttgtttttaatttctttgcctaaaatcttctttacattttaaagaaattttggaaatttcaaaaaaaacaagacagaactaagcaactgtttttgaaatttttatgatatatagggttggatattttccatcaaaagttcactattgaacacctaaaaagtagcacacatagacagtcaataatttttttttttttttttttgagacggagtctcgccctgtcgcccaggctggagtgcagtggcgcaatctcggctcactgcaagctccgcctcccgggttcacgccattctcctgcctcagcctcccgagtagctgggactacaggcgcccgcccccacgcctggctaatttttttgtatttttagtagagacggggtttcaccgtgttagccaggatggtctcgatctcctgacctcgtgatccgctcgcctcggcctcccaaagtgctgggattacaggcgtgagccaccgcgcccggccgacagtcaataatttttaaatgaagaaacggaaggctgtatttaattgcatttgtcacaataccctgaaaatgaaaattaagctttgaagaagggctaagttcttgacagtaattgtaatcggcttctgatattttgttttctcttttgctgtttcaagttacatctgtgaaaacgaggccatccctatgccaccacactgggagaatgtgaatactcaagtaccatatcaggtaagagcagaattgactgaatatacccatgaaagaaaccggaaatgactgcagtaaatctatgcaaatttatttttccagcttattcctctgcacaatcaaacacatgaatataatgaagttgctaatctctttgggaagacgatggatcgcaaccgaattaaaagaattcagagaattcaaaacctagatttgtgggagttcttttgcaggtgagatgatttctaatctgaaacttctcctttccactatgtcttttatggttaaaacataaatattgaattgtattaattttcagtggtgtagacatgctgtttttctcttgccgtattttgacctggtctcaaggctcttcagcattctcagggagtgaaagaggtgctctgtaaactttgcttgtagcattgcaatgtgagaagctccttcctttcaaggtttagagctatgcatcttggctgaaatcagcattacagaggagtgtcagagctgtttagctttgttgatatgacttccttggctaagccttttattagaagtctctgcaaacactgttttgtttttaaatcatactatcttgccaatagtcttttgtctgttttattttaaagaacactttaaaacataccttcaaatttcctgcttagcctaaagtttattttgtagatttaaaatctcaattccttactggatttaagtgggaaatgacccattaagttgggtgacttaaccaaagtaaagtccattacagaaaactttaagctattaaaggtattatccaaattagcctgttctgccatattttttatgacatgtaaaaaattaaaataagcggttctctgaaatattttcaattaacatttgtagatgagatttggtgtctaatatttttaaatatgtaagctgacttttaactttttattcagagaaattgcaaataaacacaaaagtagagtctaatataatgaacctcatgtatccgtcatcctgattcaacacctatcaagatttaccacacataaactatctccttttttgttattattgttgttgctgaagtatttttaagcaaatcccagaccataactcatttcatttctatatacctgagaattaggctgacttttgtttggtaatgatacatggaattctttcatggttctgactagttaatatggcctgcgtacatttcaggttttattctcataatagtttatggtaataaggggctttcagcttgtgttctttatagtcttgggtctattggccaaaccaacttttatttctgacaataactgagtttaactgagtttagacagtttaatttagttcttgtttagatgattcttttatagaggaagacagaagcctctgcctcctttgactttattctctcagtgaataaagtaagtttttctgaaatagtctgatgaaaatttaattcattattcttcatcagccctctgaagtggagatcaaattggtctcccccataacttgagtccccagttaaatcatagtggtaaaaatgtaccagtgactccctagaacattttatactaagaattccaatgggaacagttttactctggtgatgcccttcacggttttatgtaatgacataaattacataatgacatagaaatctgtgatggtaagtgaacctgccacctgccatgacagtacaaaatactgagtctcattataagggcagcgtgtcattttgacatcatcctgaagaactaaaataactttgtctgtctcactgtcacataacctatgactcaccatataggtagtcaggcccacgtgagtccatccagcaatagttttcaaattgcctaggcctctcttactttccccacttcttctaacaaaaatgtcttagtacctactttatgacaagcactgttctgggcacttgggatataatggtacagagaaccatagcttggagagccagaccattgtaacacagaaatgtaggggtcagcacagggagtcatgggagcacaaagtgaggggacccatccacctttgccaacaaaagtaggggatgtggagtggagtgggtagaattagggagccccagacaccagttggataggagaagggcatctcaggcatcaggggcagtaagaaccaaagtctggatataagagggagcgcagaaaattgaagcagcttcagattgaacagaaattaggtagaatggtgagagaggaggctagaatggtatcaagaggcagagcatgcaggagtttgtagtagcaccactggggtggttgtgtgatcgtctttagtagccttagttgagttggattgaaccagagtggaagtcagagagttagcgggggctagaccacgtggggccttataagctaaactaagaggtttggattttttcctgggacagtagaatgccattgtagaactttaagcaagagagtgatggatctgatctgcattttagaaaaataattaggctgtgtggtggagaagggatttaaagcagtggttctcaactgggagtgattttacctgctgggggacatttggtaatgactggagtcatttttgattgttaatatggcagggtgggggtgctcctggcatctactggatagaagccaggatgctaaacatcctacaatgcatgacacaacaaagaagaagcctttcacaacaaagaagtgtccaacacaaaatctcagtaattgaaatcccagttcatagcagagagaccagtttaggaaattgtttcagtaattaaactgagacacgttgggttgcctgacccaaagtggtatctgctgtgttggagcaaagaagagagttttgaggtattaagattatagaatggtagggcttggcgcctcacttattgtatgcgatggagtgaataagggagatgagaaagataactcccaagtttttggcttgttttacttgactaagggaatatcagtagggacatctttagggatgatggaaagggagtattagttgatatacagcagttgacatatgggtcaggagttgagaagagtggtgtagactagagacaaaggttttggagttgttagaaaatgtggggtaatagaaactataggaatgaagaagatgaccagggagcgtatgtacattaagaaaagaagagggccaagggtcaaattctggaagggatgaacagaggaagagaaaacccaaggaggaaactgacaaccacagaaagcgggagaaaaccaatagaagatgtaatcacagaagctggagggagaatgtggtttacacaagtaggtgccatctgtacgattacatactgaaaagatgtcaagtaagataaatttgaaaagttcctttgcatttttcaataagaaggccattggtaacttagatgaaggcaaggttggtagacatcatattgtgtatacagcaaatgttgacaactttttcaagaagcttggcagtgaggaggatgagagatgtgagaagacagctaatgtgggattattgttatgttatgtttttaaaatttaatcatgggagagaactgaacattgtaattggaaaggacctatggagaaggagaatttaaaagacttagagaaagagtggaagggcagttgatggattctagctcctgaagaagtgtggtgagatgaaattctgagaacatatgtcagaaaggagatagagaagggtggtccagttatgtttacagataagtagaggtagaggacgaaaagaggagttaggttaaggagttcttttctgataccttccgtttcttttgtgaaggaagaagggaggtcacctacagcgaatgaagtgtagggaggtgttgataagagggaaagaaaaggggaaagaggagatttgaaatggctactgtggaaaatggggtagaacgagctgtcttgggaaccacaggatttctgtcagcgttgagggcttagctaaagtatgtgaatttatagggcaaaccatgttatgtaatgtacttcagcagtacaaatgtaagggcagatagtggaaatggttggattgatccagagctgggaagtataaggcagcaaggaaataagagcatcttgttaataatgtgaatttagatcagagattctcaaagctagttgcaggtcagaatcgccagtggaatttactagcaagtagagatacctgtcacccgccacagatctactgaatcagaacctctgggttctgacatttttaccttaaaaaattccataagtggctctgatgttcagcaggatgacaggtgttctaaatctaggcaaatttattttaatccagagcatgaaagtattcttgctccagtgcagagcatgtggcatacacactttagccagtttggcactctagtccctaagaggtggataattttgagacatctttgagaagtgggtgcgacagtactttcagtaagttcgggaatgattgtggatctgggcaaaggtgggcagggttgtgaagaacttagtgtagttctgtgactttccttgcagatgtaactaaagttcatgaggccctggaaatcacctttagcctttctggaacaccaaggtcatagtctgtgaatgtccgcatttcgtggctgccttagtagtgggagtagtgggcactagaacaaactgtgctgtggggatacaaagctttaaccaccatgcccctgccctctgccttcaactggtatatatgcaccatctaatctagtaagtaagcgttgttttccatgcctgcctatgcccatactccatgccctttaacccacagtttatttataatatctaagagaaactccagtgaattttcaaaccgagattcaatcgaatttgtgcccgaaaagtagtgataaatgaatttttttttttttgagacagaatctctttctgacacccaagctggagtgcagtggcgcgatctcagctcactgcaagttccgcctccggggttcatgccattctcctgcctcagcctcctgagtagctgggactacaggcgcccgccaccacgcctggctaattttttgtatttttagtagagacagggtttcaccatgttagctaggatggtctggatcttctgacctcgtgatccgcccacctcagcctcccaaagtgctggaattacaggcgtgagcctctgcgcctggccttctttttgagatggagtcttgctctgttccccaggctgcagtgcggtggcacaatctcagctcattacaacctccgcctcctggattcaagtaattctcctgcctcagcctcccaagtagctgggattacaggtgtgtgccaccacacccagctaatttttgtatcttttagtagagacagaatttccttagagtggattctagtcattgcagatcatgaagcacaacattgacaagtttgacattacagaccatgaagcctggcattatgtatgatactaatgtttctttgagaaaaccagtatggattcactaatgccaaactaactaataggattaccatagtggtagatggataggccccttagacagtctagcttggtttctcactttatagtggttgagaaagtttcttttcaggaagacaagatggagaaatatgtgctggtgggtatttcaaagagaaaaactagtagacaaaaagtcttacgcaaagagtaactcgaaaggcatgcatgctctcttcttggatccttcaaaatttttatcagaaatggatgaaaatgtagagggcttgcttatcacacttgtgagggattcaaaactagaaggggtagcttatttgttgagtgagtgaatcagcagtcagaaagaccttggaagattgaaacagtgggtaaaaacaagtattatcttctttttttaatttaaaaaacttttttcgtttgtttttataaagggaacaaatgcgccttgtttaaaaaaagtgagaacataaagttctgaaaaaggaagttcttagtgaaagcatgctgactttttgtaaagtaaacatttgctaaatgcacgaccttctgatgtcatgcttaatggtctgaaaagactgtcacaaatagatcaaagcatatacatttaaattttgatacatactgccaagtgactcttgagaaagaccgtatgcgttttcatctctgtcaccatttaaatgcaggtatccattcccaaacatattcaacgagctgcctatcatttacagaactcagtctgagatacggatattttactgttatttaatttttactttttaaattactatatcaagtaaagcttaactgaaatctattgcattcagtttataaatcagttgcacagatttagcaagctaagagaggtctggtttggaaaagtcctgggagttttaaccgactacacacttgattatggatgcagtttgctgccctgttaccaaaatacattcagtggtgtcggtggagtcagtgctgtctgatgatatctggactgttgctatttcatgccaacatttataaactagaaagtatccagcagattcttgttaactaaagactgttgggataaagaaagacctagaagctatgctgtgtcaggagtggttgaaggaatggtgtatatttaaccaagaaaagaaagcctaggtaggtgttcaaatttgcaatgttgttttgtgtaagagtgatttgagttgttaatgttcataagagaataactaagaccaatcaatagaagtaacagaaggcagatttggtttggcattgagatggatgtactttccaactattacagctgatcacaaataaattgtgctgttttgcaaagtgagcacgtgatgctgtgagtacttgacactggatgaattgaagcaggcattaaagagctatcagaagccgggggaggggattctttttaatttttaaaatatgatttttatgaaatgtttcaagaatgaaaatgcagcaaatagtttgcagactcccatgtatctaccaatcagatttaacattttgatacttgtcacatttccttcctcttcacacagatacaggtgaagtgtttactccatccctgtcctactctccttctttcctcctgagattggtatggtgccttattgtttgtattttgtattttttactacctgtgtatgtatacctacataatacacagtattattttgagttctctatctctttttgcaaaattctttttacattcaatattattttttaagatttactatgttaatgcacatagatctacttcattacttttaacttttatatgtaaatacatgactatattcatttctctgtgaaataattttaggctgttttcagtttttgttttctgttacaatcagtcctacattaaatatgcttttatgtgttaggatagatttatccttgggaagaggattaaactggatggcttaatgtccctcccaaccctatggtgcaaaatttagtcaactgaaccaacattttctagtttctgaggataaaaagcatatgacatgatccctgctcaaggaattcactgtctaaagtctctgcaaactttgtattacttgtttgttgtctcatttttaggcatctataaaggttagctggtttagacaatcaattacctttatgatattggggcatagcatgggataactatagtttttggcataattttcaaccttaagtttcagtgttaactaataatttttgatgagatgatttatgtgtccaagaacatttgaaattatttcttttctagacttgctttgtccacttgttatttatattaaagtatttcctgttttacgctttctattgaaccttgctcattaagattaataaatgctacttatggtatatttctgtgtgcttttgtgtctgtgtatattgtgtttttaggaaaaaggctcagctcaagaaaaaaagaggtgtgcctcagattaatgaacaaatgctgtttcatggtaccagcagtgaatttgtggaagcaatctgcattcataactttgattggagaataaatggtatacatggtgctgtctttggaaaaggtaattatcagaattccaggtccaatttgagccccaggagagagtttcctctttttagaggaatataaatataaatatgaactgctttatggcaaatatatagagaatgataaaacaaatggattataattgcattgtgtacgagaatagatactagtgtttttgttttattttgtttttaagaaaatcataggtaagaatattagtgagcaataaggaatagtgggggaaaacttcacgttatttataatgttgtgaaaatccaagtttttcaatttatgtctggtactcaggcaaattaaggagagaggtgaggggaaaaggtatgggatgtacatttaattttctggtccttactttgtaccttgcttccagcaagagaactgactactgtttaggatcaggatatgctgcattttgaaaatgtaaattaatttaaaaaataactactaaaaaggccattccacttatttaactgtaaggaggtcagaaggtgttacataaatcccatcagtgttaggtaaatatgagactttgcaattcatttccacatttttttagagtaagaatgcccttaatgatgtctatctcttgtgtctaccatttcagaagagttggctgctttatcgagttttcatgtgtaggcagtgagccagtaaaatcatttttgttttggaatgctcagatatgaatagcattatactctctcagaaatcttttcatggatatgggattctattgtttccagaaatattactgaattgttatcccatatcatagaaatacggtttcttggggtttaaaagaatccctgtaggccatcggtttccactgtgctctctagagctttgctggatgttgacaagggaacagggtgaggaagtggtgaaaggaaatagaaacgggagggagggccaagcagtaaaactcagggccgggcatggtggctcacgcctgtaatcccagcagtttgggaggtcgaggcaggtggatcacctgaggtcaagagttcaagatcagcctggccaacatggtgaaaccctgtctctactaaaaaaatataaaaattagttgggtgtggtggcacgcgcctgtaatcccagctactcaggaggctgagggaggagaatcgcttgaacctgggaggcggaggttgcagtgagctgagatcgcgccactgcactccagcttgggagacagagcaagactctgtctcaaaaaaacagaacaaaacaaaactcaggtccaaccacacttttaatcattaaaccagttttatctgttttattaattgttttctttgtaagatttattttaaaaacagaagtctgatagctatattttggtgggggcaggggatggtgttggtggtgaggactggtctgtaccaacaaatctattcctatggcagtctatactacagctgtccataacagatggatttctattcttctcttaaagatctgcagatgaggaaattccacatctatttttattatacaattctatgcatctattctcctgacaaaatgtttttgcttgtttttaatatattcttcggagtaatcttggcttttcttggtcctctttgtttaaggaacctattttgctagagatgctgcttattccagtcgtttctgcaaagatgacataaagcatgggaacacattccaaattcatggtgtcagcttgcaacagcggcatctgtttagaacatataaatctatgtttcttgctcgagtgctaattggagattacataaacggagactccaaatacatgcgacctccttccaaagacgggagctatgtgaatttatatgacagctgtgtggatgatacctggaacccaaagatctttgtggtttttgatgccaaccaaatctatcctgagtacttgatagactttcattgatttcacttccaaatctcggtggtcaaggaagctttattcttttttgcaggaaggtttgctcttcagtcatctagccactaaatgttaattatctgatacttttgaaacagatatgaaaaaaagtggcctccatataaaaagacatactgacttcaaggttggtttttgttgttttgtttttgcctgtttcttgtagtcttgtttgttaaaagttgatatcattgatgttttaacacataggggtgaaagataccattcaaaatggaatcagctgagtctcaactaatgtggtcattgagatctttaaagtttacgtgtgtgttatcaggataaatgattttagtttaaatagacttattcgtataaatgttgaaaaaaaatacagacataaatgtgtccctttagaggaattgatcctttgtaaattgaattcaggtagtagtatcatccaccaatccatctgttgctttgttggtcttctgaaggggggatttaaaactctgaaacagtctgagcaccttgagagaaatcagaaacaagacaattatttgcagtgctgtcaaacaagccagaaggagaaaatcaaggtagaatgccccactttccagttgccttaggatagcaggctgcagcctcagacttgatcctgtcattctcctctgtctcccacatctgaattgataattgctgcaaaatgtcattagcctacacttcatccatcagggctcttggattcttacaccacgacttgctgtgcaaggtgtttattgcatcttcaaagtgaaactttaaattattattcaaacatttattttccttttgttttaaaaagagtccctacaatgatcacttctaagatttttttttaccttcccctctgcagcacacacagctattcaacaatgatttctaaaattcatatttcaaatttgtatctctccattttgaaacattatagaaagcatgggatgcttgagacaaatctggtttctcctttgaagtagctgttgacaacctactctcttgaaaagttagatataattcttaatcatgtttagtggaaatttgtttacctgttccatctgttttgctgtttcattgtaaggaagatgagaagtgttggaacagcttccctcccctaaaggtattctagcagaggcgagacagcaacttggcgggcatgttgcataggagttaagtaccagatggggaattgcccatgtgatggtgaagagtctctcacattgattttcttccttttctcctcttctctcctccttctcttctctcctctttctcttctcttctttctcttctcttctgtcttcctcttcctcttctcttcctctcctcttcctctttctctctcttcctttttctcttcctctttctctttctctttctcttctcttctctctctcttccttccttctttctttccttccttccttccttccttccttccttccttccttctttccctccctccctccctccctcctccctttttctttttctttctttttttttggtttggcagagtcttgctctgttgcccaggctgcagtgcagtggtgtgatctcggctcactgcaacctccacctcccgggttcaagcaattctcttgcctcagcttctccagttactgggactacaggtgcataccaccatgcccggctaatttttgtatttttagtagaggcggggttttgtcatgttggccaggctgatctcaaactcctgacctcaggtgatccgcctgcctcagccttccaaagtgctgagattacaggcatgagccgctgtacccggcctgattttctatgattctgcctttaaaagacagcacgtataccaagcctttttcagaaagcttttctcttaactccttctaatgctgaattttctctctattatcctcacccaattttggctgagagttagtgtacacaatttaacttcttagaaaaattccagtgtctatgcttatattgctcacttgaatcatttgaattagaaagggatctacaaataataaaagcaaagagtgcagacagattagggatagtaattcttaaagtgccatctatcccagatttccgttatagaccagcatatgtgtaattgtgcagtgggaggtaagtagtacccaggacattgcatgtacaatactttgaaacaaagtggcaacaaagatttcctggctcaggtatgcaccccagctgctggtttagatgaagtgctgagaatatttagaaaaagcgctttaaaaagcatctagagattatcatgaaaataattggagacaaagtcactaggctgctttgtgagaggcagcataccatggctctaaacccgttcacaaaaaacaatgttagagacattaggaattcaggttttgaaaatctttttttcgatttatttgtaatttacataccaaaaaaccacattaaaatagtcctcccttcaacatggctatcttttttcaagttttatatgcatagctctctcagcacttgaatggaaaaactgttacagcatttgggagttgtttttcttttagactttgcagatcttatctcaaggtgactaggaacccagagctaagtatctgtgaggcaatctctgcgaacgctgaacttacctagttggtttctatgaaatatgtagaatgcactgcagtagccattgtaagaaggtactataccggttttttggggcttgttgttgttgtttggtctgagaatgtactgccaacccctcttttataagagagaactgattttgatacatattttaaaatatgatagtacagagttaatggatgttaaaattttatttctttgttttggtaagtagattaaatcgagaatcatataatcagtacatttgagaattatataaccagtatataataatactggacacaaccatttgccatcttttcctgttatcatcccatagagtgggtggggagaatgaatagacataaacctagaataatgataaatggtttttaaaactctatattgaatacattccagctgataatgacttttctttttcaccttggtgatatcagcctcagggtaaaaaaaaaagtttcataaatcttttagttataaacaggaaagttttatattagtgtgtcatttcatttctagactgttgatggtgatgatgataaagaatttggagccaattttgatatatgaatgtattgcttttacatgtgatgattaaagctctccattagcagttcttggttgtctgtgtatatcatatatttgtttctgtgacttatgtatctcatctccaccttgtattatttaaacctaagttttcagctcaatcttagtggacccaaggagtttgttgcctgtaactcatatgtaccccacttgcggatgggggaagtctcttgttcttagtttgaatcatcatgagcaatagctaatcaaataacctatgggaaaaatcatttactgtgtgctattataaaaaaaaatccccaaacaggccaagagttggcatctgcagcattttttattcttggtgtgctcccctggctcagcggaacagctctgtagggtgtgtctgccttcatccaaggagtatccttcctacagcccatctaacctccagccactcgcactgtgtctaccatcattcctgttgaactgagttaaacattccgttcaacctttggcaagaaaggatggtatcaaaggctctcctcaggttagaactgagagaaatgaggggcagaatgattgactcattgtgataaaaattcaattgagctttgattgttgatctagaagagccacatccttccaaattctgttccctagccattcgagtgtttgtgattacctcccaaattgctaggaataacacgagaaacaatcttatggtgatcctagttgtgtcgcctccagattttccactctccttaaggattatttgtttattttaaaatattttcttttgcttaaaacaacgagacagtcaatttctagatgaaattatacactctgtacttgtaaaagagataaaaggtaatgaaaaatagcacggaaaggaaaaaaaagacccttgtcaaaaattagtgttgattagaaactttaacaaagtgattttagttatttttatccctttgcactctatgcaggaagagttttggtgatacgagatagtctgccacactttcttatgaatcatttcataatgttacttggggcaacacagatggaagaaatgaacatttcaaagaactatgaaatacataattatttgcgggctgcctgattagtgtgagtaatatatgccgggagaggtgagccctgaatatccaggagagaagttgaaagttcatgttttaaccttgactttttagcagtggtagtttacttctcatgtcttcagaaactctaggatggaaggtggtttggggacttacatctctctctttcctcctgtctccttcctatattgagctctacttgatccatctcaggtaaaaggatgtctcagttatttctaaacccaaacagtaaattccttgtaactgatctgagtctcctgctgtaagattttgtaacccattttctcagctttaattgcttggcttccatttgtcagcactacaggccaagcacctggctatttgaattctctcaccgtgtggctgcgtatctaagaatttagacactgtcttacttatttttaagtggcttttcataagattggagcataggttttatgccaaagacatttgtgttttctgcagcttcttagcattgctggaccctctaccaagaggttatacggtaagctgattctgattctgtggcttatgctgacttcatgattgtaaaccaacttaaggagagtcaccatccagaatttaatgaaatcatctttgcaatattgattatacatccagactgcacttgtgttttcctttttaaaaataccttttcctgaagggctcattatgctttaatgtctcctagataacatgtggaagctgtaggcattataagcccacgtttgatgaacagtctcagagaatcagcgtgcaagctcatttcctccactttattcctataagaagaagatcaagcctcaacttgggagccagctgatctgaattttattcctggctttgctgtctgattcagtgtgaccttggataactcaccagagagggaaggttcacttttcagaaggtgaagtttatgatagaccaatcagactctcgttgagagaaaaagacctgacggagcacagctagattttcctaggcaacatctgacctgactgaagatgatttttgagtttgggtcgggaaaatacaatagcagggatcatgatgcattgagaagaagcaagggcttgcagtaggaaggaaaaagaatggacctggttgtccatgaaactctgccactaattagtttccccactccctttctagttcacagctctgaattcttgtggcgtgccagggactgaacaagtcagacatggcctctgctctcatggaacttaaagtctagcagggaagacataatgaactgtaatgacaagagtgatgaactttcctgaaggggaagttcaggccactgtgaggctctgacagagggatttcacctgtcctcaggaattagggaaggctttcctggggagtgacatttgaatgtgaagatagaaagataagtagatgttaattaagggaaggaggattttatgtcccccagccacacccatctgtgccatatcaggctttggagagatgagaaaaaccagataggggtagaagcaaagttggaacattgtttttatcattaaaacaaagatgacagaatcaaaaccattcaaattgtgttgccccaaacccctgcgcctggtcctggggtcagccttaagggaaccaggacccagcagtaaggggtatgtggagaagggattgtgaagattttatacagtttaagggaatcaagaagcttgttgggtaaaggagttccttcttggcccccatgcctttgcttatgcctttttgcctctccctagaacacacagtcatattcctccctcttgaaaactctatttgaagcatgggctctggagtcagacgtccacgttgattcctggcgccaccctttaccacctgtttcacttgagcaggttgcttaagctctctgtgctgctgtttcctcatctataaagtggtgataataatagtgtctaccctagagggttgttgtgagaactggatgaagtaatacttgtgaagtgtttgggatgatgcccggcacgaagcctcagtaaatgctggtgggtattaatacgtaaggcccctcgtctttcaagaagtcttctatacctaatacaaccctcacaagctaggattcatacagtatttatagtgtacttggaagtagggacataacttttttttttcttagcatttacttggtcagtgccctttggccaaagaccaccaggagcaaccctgtaagttaaacaaattaggtttattactcatggcagccagagagcacacacaccctgaggaactatggggtgtcccggtaggagggtgcaagaaaagcttttgtagggtttgggctttggggatatggggaagggtctgaggagttaggatttcactctaattggatgccgtcagaaagcaggggcaattctatgatttggcatgttcataaatcttatctatagagagggaagtctagctgaggataagctgtaattagcaaagcagaagcagttgctcatctggctgagagaagtggttggtattctgtgggtggcacagtgaccttatttttgtctgttcttagacacaattatgaaatgaccttgttttgtctcattttattgtggtctcagaataaccttgtcagaggttggttttctgtgagatagtttaggttcatcagaataacatgccttagctgtgagtaccaggccagtttctaaatgtcagaggctgttctttttgttctcaacttgtctaacttttgtttgggctacttttcttcctcctgggaaattgtaagagaatgtatttactcattcaacaaaccagcaagtgggtacctgtactccataccaggcacgatcctaaacacaggacacagtagtgaaatctctgccttcaaggttctccaagtcttggataagaagtcttggataaaattgtgtttcagttaaccgttttgctagtttaaatgccttcttcagctttcccacaagtattccagcttgtactggatactttcaatgattaggaaatactacatgctgtagacaattctgaatgctagaaaattggttcttaccttgatctataatttctttttcttttcttttctttctttttttttttttttttttgtgaaacggagtctcgctctgtcacccaggctggagtgcagtggtgcgatctcggctcactgcaaccttcgcctcctgggttcacgccattctcctgcctcagcctcctgagtagctgggactacaggcgcctgtcaccacctggctaatttttttgtatttttagtagagacggggtttcaccgtgttagccaggatggtctctatctcctgacctcatggtccgcccaccttggcctcccaaagtgctgggattacaggcttgagccaccgcgcccggccttgatctataatttctttcctcgtatattccactgcttgggtctatatctatacattaaagacactcagaacgagttccctgcatgttctctagctgtttacgtagttgacccacgggcaatgtaggtgaactctggattttcatgattccttgctgtgctgactgctcttacattcttctcaaaagaatattttagtttaacaaataatttaatgttgattccattttccacatggatttagtgtttaggcctgttttgtccgactgaaggacagactacattatcagggcttttctaatgaaagtgtatgtaggcagttaggtgctactgcgtgtgagaacagcagacgctaggtggcagcatcttgcttcggaactggcacaacaaactgggcgctgagttcatagctgcattttagagagcagggtcaaaggaccttccagaagttatctagtccctgccaccaggtgggacaacccctggtcaaatccaccgacataggtatttatcccgtttatagtaactgctaggaaaaggacacatcttcccaataggaacctagtctattattttagaattttgcctggtgaaaattcttcctaaataaccgtgccacatactgtcatctaatctgttttccttctttcttcaggtgaagtcgcattaatttaagttaatttagaaaaagatcgttggccattttctgaggccgtgcgcagaaagactgttaccagtgagttccctgtcaaccttactccttcagctcacccatccacccatccctcaccttgccagaaagattctgaatcccctaacgtgcttctggctgtactccccagcttcttatttacctctggcactacctcctggctgtgttctccatcatgcttgagttatggagcccccaagttttgtcttccttgggggttcgggttaagaactcgggttcttaacattgtaaagttaacacctcagaacacaatatgccctctgagatatgatattctatgctctttttaaaaaaatgtgtgtcagaaaagatgggccataaacttagcttcaaattgaaacagggggcgtatcaactccagatgtttctgaagtccttctctcaaagtcttaggacttgaaatggtataccacaaatattttaaaggtataatttttatactcttcctacaaaattgaggtgaggccaatttgtgactgtggaagacaggaagaactgaatgcctgcgatcacgtttccatgtcagaaccaggcagagaccccaggcagtgtgattcccagtctagtgatctatcttccagtgtaatcgtgttgtgctgccgccatatatgcaagatcttggcactgatattgttcatttaaagaatttttgtagcaggagagtagtattgtgaaaggtgtgtgtcaggattttgtgtttgaaaagcaatgtgttctaataaaacacaggttttagagtcaggtgatcctggcaacagacccagatttgctgctttctagccgtgtagccttgcagaagttgaccggcttctcagaactgctctttcctcacagtttaatgctgttgtgagaattacctgaggctgtgtgagtatatggagcacttagcacagtgtctgacatatgctagttgctcaagacttagatacaataatcactgctggctgccgtgttccaggagaagggcctctgtggggccatgagtaaacccctgctagtctgggagaagtcacactgcagtggcatggtgtcagatctcaccctatccttcgcctctcaagaaacataagtaaggaacttggcatgcaggggagaaaaaacaagccacagaaaggccaggcaacataaatgagaacaaatctgtgattttgagttattaatgtccatttcccttggcttccaggcatatctgtttctcatccattccagaaaaccgttagtgggccagggggccagacaggtttatggataaggatagtatgattttgtatatctcttatacttttcattgccaacttcaacagaagcagcaatagtcacctgatacttttataatatctagatggtcatagatttagtgtatattttcaaactcaaggaaaataaaatatatcaccattttggactaatgacagggaaaatggttcagaagttgatgacaatactggtggcgggtgctgcaataaaattggataaatttgaaatactttggatagaaataatgaaaacaaaggaaacattcattatccattaattcactctcatttctggaaggaaggaagaaagaggaagaaagtcttagttttgttattatgtggttgcaggtgttaaaactaccaaacaaatcttaaaattagaagtttcaaattgttgctttggtcattaaatatttatttactatccactatgtgccagcagttatatgccaggccctgtgctggattaacatccaagatgaacaaggtgtggtccttaccttccagaagctcttggcctactgaggagatagttatgtaatcaaacaaataattccatgtgctaagtgctggtcagagacatgaattccctatcatgggaaatgcagaaagccaagggatcagctattcctggagagtagggtaggtgtaacctaagggtaataaggcaacgttttacctgaatcttgtaggaaaatagcgtgtgacagaagtgaaaaaggacaatccaatccctacaaatcacggaccagtgtgtagagccaggaaagggccctgcgtgtctgaagcgtgtgcagcagcaacacatggtcgtgtggggaaagcagggagtgggaatggaacagaataatttggggagacaaaaaaaatgttaagcatggttggaaagggatttgtattttaagttaaggagtttgggttttgtttgaggaactgaccagagtttttaagaagttggggcacagtttgtaagactgggtacgcagagatgtcattagtggagattaacaatgtggaagacagaacgtcgttggagagtgtggtgggcactgctcctttttcctggaacagcagtggtagcctgttgttctcccctgcttcaacttgtacatgtgaacctaagaagagctgctttctacccctgcccctgttcccaccttttagaatacaagacgctatctccttatctatagtgattgttcttggggtggataccagatgcaagctggttcagtcatagtgtcttgtactctacgctggtccacagtgtttggcctaagtaggggtgcatgacccagtctgaccccttccctggtatttttgaattttgaattgtcactaagggaaatctggtgatggatctgggaagttgcaactccagtgatgctagtggttttgtctttcatgggcgtaagaagctggtattcagtagggaaaagtgaaactaacacagagagaagcaaatatgagagataggagagttctggtggccttttggtttctgatttcaagcatcctgaagctggcttaattcctgccatggtttggttaacataagccaataaattactctttttgcctttgctggctagtgtttctgacacattagtcctgactaatgacaacaggaagataattaactctgattttgatatattacatttgaaaagacttctctagatggcaaggagctcaagagaaaaatcatggctagaaatatagatgtaaaagccacctttagataagtggttgttaaagctatagaagtggcttctataaagctatagaagttcacccaggataagtgtggaaagtgttgagaggccaaggatggaaccttgaagaatgctaatatccaagaatatgcagaagaggaggaagcagctgtttctaactcgtaccatttctgatgttagccagcccttccaatcttacagccctcagtgggaaaaaggtagtctattagaattcattatcgtgtccctagctttgggagtttttttttttttttttaaactgctctaggccacatctgaaatctgcctcatatagctctcagtcattggagtaaatataagcttccccaacatattccttcctgtatttaaaatctaagatcttataaccaaatgtcttctcttcttcagtattaaatccctcccttctttcagccatccctcgtctgataaattgtcaaattgtattgatgtcttttaaatatctctccatgttgcttatgaagggtgaaatctgaaacagatactgtatttgagctgtaatgtgactatcacagagtacagtggaactaatgtgtcttcctgatattaacctcatactggttgcactattgaggaatattgcacttgtcactaacaaaaaaatcacagatttttttctaaaaatttctagaagcccagaaaaatagaatctataattatatgattgaagttttgagcctaaacaaaggcctttacatttgtccctgttaaattattttttatacaaaaggataattactgtagcctaacatgtgtgtaaataattagaagcaacatacctggccaaaaataaggtaatattaaatataaacacaagatggaatatcatgtgtctgtgaaaattatctttgtgaagaatatttagtgacatgagaaagtgcttagggtataatgttaagaaagttgcagggtttaaaccatatgtaataaattgcaaaagtcttttcactgggaaagggagtgtgactcagacataacagaagcaatgtccctgttaaattttatcttattggtattaacccgttatcccagcttcaaaaaaaattttttatcttaattctattacctaattattagtcattcctctctcctttgtgctgtccaaaaattggtctaccaaacaggacataaaagtgtttatactattgggcaagtatagaggtctgcagtaaatatccagggatgcacttgaattttgggttacagtaaccatacctggatatattatttaatcactagattactctttagcaggatattattagaaaatacattcagactgaaaggcttcttaaaagatcatttcatcccatctccacacctctattcagatttggtattatatttttttaggaagaacattgtcctagtttgggccactgtaacagaataccacagactgggcagcttaaatggaaagttatttctcacagacctggaggctgggaagtcccaaatcaaggtgcctgcagatgtgattacctcccaaaagtttcacctccaaatactgtcacatgggggataagatttcaacataggaatttgggggcatttagcctgtaacaaatgttattgcccaagattcccatcggttgccaaaagtcaaaagtcctgaattcattgtgtaccttggtatatgattttgaccaagaaacttagccaagactcttgctttccttatcagcaaaatgagatttgctgtacatgaaggtccccatgtcagtctggtctgaggagacaagctacaacacaaacaaaaatgggatttgctgtatgtgaaggtcgattagaacaaaggcctttttaatcttaaaggttaagtgcatggaaagaacctctgatggaaatcaaggagtactgacagcacgatgtggaaaataagagagaaaagaaaaaaaggaagatggaaattctgacaaggaaattaagatgcatgtccatggatgttttttgttttgatgatagcaaaagagtgatatatttgcataacaatgtaagtattgtttgtacttaacaaaaatctagtttcctttcatagagttcttaaaggacagaaaatatttatctgtctgaacaccattagacaggtaaatgatgaatgagttaccactgaatacctcttgaaagctgatgtctgtcaaatgttgaacttctgggagagaagtataacaaaatacaaggaagctcaatggtcaatatttgcaaataacaaagtactccttagattggaagttactaccttagcaatgggcaatattaccccaacaatattaagtactgtgtggtttaatattactacaatttgaggcatattatctaaatgatttaagatgtgattaattgtttccagatttttacccagtgctgtggtttgaatgtttctgtgccctccaaaattcacatgttggaaacttcatcatcaatacaacagttgggaggtaggacctttcggaaggtgtttaggattaatactgctataaaaagcactctaggtagtgggtttgctctctcctgttcttctaccttctgctatgtgaggacacagcaagaaggcccctaccggatgctggcaccttgatcttggaatttccagcttccagaactgtgagagaactgtcaggtttgttgttgttgttgtttgttttgttttgtttttaatagcagcacaaaacaggctaagatactcaggatttgttttaatcaggtacgataaggtgacagacacagagtttgaaagaagttttctttcttatacttaagagaaggatccatgccatgcccttgcagggccacatgggggaagtatcagggtcagtcaggaggcagaaggaggtgagaggggaaagcatggcccagagcatttattgtggttttccagggaagtaatggatgagacaagaaaggcaaatatgaggaagtttgggggttggatagtagttctggtaatttcagcaggccctggattataaaggtggtctctggttgtttgacacctggtcctggggtgatttaggtcaggggaaatactggcttgctgtatgagagttagataaagttgtggttggagatacggcctttggattgtttggtgtgcgtatgaaagacaccctcagcagagtcctttgctgtctaggaattagccggccctgggagggccagtctgtccctggccaacagagcactacaaaatttagaaaataaaaagtatgattaatacataaataagtgtatctttttaaataactgacaaaatgagataaaattagttaggactgaactaaaatacagtctttatttctcactttactcctcattttgccgcctgattctccctaagaagatcactgtctggatagggcacaaatttctcttgtcctctgcaactgaagttttgggatgaacgcctgtgggtgacggtagtgatgtcgtgttcccaggatgcatcatactctatttactgtccttgggagaaaatcactgactgccttgcagctgcctaccccaacatcttgtccatggccaaaggcaacttcacggtcctctgtgtcaccacattcccacaggaacccatttgctgggaaaatgaaatacaatgtctgcatcttttgttttttcagtcagcccacaatggataatgaatccagacctcaagggcaacttaatgacagtgtccaacccctgagagggttattatgcagaagttgggggccagctgctctccatcttctttgagaacagacaagaggaattggatttaaaccatggcacaagatgtgtcagttagacattagaaagaattgcctgtcacagtttgaggcatggaattggtgaccagggacagctatgaaactgcttttcttggggacttttaatgaaggaaagactggcagatggatgaggcaacctgccagggtaggtgtgacatagaaactacctttttgatctccctccaggagtacatgtgcttgtccttagaaccactctctcataagtcttagcacaagatgggttcgtaccttatctgccctactagactctagcaatctttaggcaatgacaatgtctagcatggtgccttgcacacaattgacgttcaagaaagattttttgcatgtgtgagaatgaattaagatgatatttgtctttgaaatacctcaattcctcaccttcctcttttccaccctcttttttattcagcaccctttctatcccaggtgatctccaaagtctcttccaactcagaaattttagtagtctgggtttacttatgttgttagtataccatttttacctttctttagaaagataggtcttatgagtcacacacgaatgttccttaataacagaataatgatttctaattatatacattatttcaattaacactgaaataatggactggtgtccatcagtggactgggcgtcatcaaccgaagtttgcaaataagcagtctaaagctaagattgtgacctgtcgaagcttaaatagcaaagaaggatgtaaactcacatctgtctgaccccaaagcccagcacctagacacagtgggttttcttactcaggaaaatacaaaacttaaaaaagattctaaggaggagagcccaaagacattagtatccaaaaagagaatagcaagccctgctactggaatgagtgagacataaattgggctgtatgaggaactgaaaacctcagctacatgtaagatcagccctggcatcccagctgcttagtcctccctgcctcgatcccaactactgcttagtgcctgcaaaacgcaggcagttccccaggttgtctgttagggtgggaggttgtcaggtgccagaatctatagaggcacttagggcccggatatctgagcttatgttactgctctgcaacctggggactctagcatttcatctacctgaagagttaattttcatccctccctttctggcctctgaaccactggaaataggatctctctgtcaacagtgcctttgactgtttattttccacttctccagttgcattttgttctcagcttggatcattaacccacggtgtggaaattttgatcagacttggatcctagaggaccaacgctgtggtgtatttagctgctatttcagtaatagcaaatacttaaacctgtaagacactgcctataggctgtctgcattgagttgtttttctaccaaatgtgttcatctgcccagactccttttaaagaaagtagtaaattccctccctgcaattatagtgtaattcactgggaaagtgtggtttaatttgtgcatcattttcttggatcaaatgaatcaccctaaagcaatcttcagttgaagttttgttattacaaagcccgagaagatcgtccaattatcatttagagtggttatcagcctgttctacagtaggaagctgaaaaggaaatgcagttttattttcagtggcccttatcttggtgtccaaccactgccatcctccatgcttaaagagggcaggaggagctggaacttggaactgtcattttgaaaggatgatagactctagggatacatccactagactttttttgttttttgtttttgttttttttgagatggagtctcactctgtcgcccaggctggagtgcattggtgcaatctcggctcactgcaagctctgctttctgggctcacaccattctcctgcctcagcctcccgagtaactgggactacaggtgcctgccaccatgcccggctaattttttgtatttttagtagagatggggtttcaccgtgttagccaggatggtctcgatctcttgacctcgtgatccgtccagctcagcctcccaaagtgctgggattacaggcgtgagccaccacgcccggcctacacccactagacttttaaattctttgaggatgagacctatgctagacatttgtattcaaggtagcacggcataatgattagcaatatagactctgaagccagacagcctgagtttcaatcctgcctcgagcactagctggctgtgacctctctgtacttcagtttccttatcagtaaaagtacctgtctctcagagctgttgtgatggtgaagtgagttaacctatgtagagggcacaggacgcagcctgggctataataagtactgtatatctaactgtatagtctggcactgagtaggcttaataaatgtctgcgaaggaatagcagcattccatcattcacctgtaataatctctttgtggtatcatcactactagatcaaaaaggtagggataaatttctggaggaaaaaacgttgtagatagttggaatgattgaccaaggagggagtgaaatattttgggggaggttcttatgaacatattgactctcctcagtcaggattcccatgtatagtcctgcatattaacaaggagttggaggcctctagagagaaaatggcactgcaaattcttcaaacaagagaaaacagttgtcctctgctcacatagatcatacatcatagcacgtagatttgcagtgtgccggtctattttgtaaatatgccaccgagttccagtaggggcacagctaagtttctgcttatttgttggcagtgagattgacatatccagagctaaaggatacgcaaaacctttccagtaggtttgctagcttcacccacttctaggcaatcttgcagctgagtctcccaagtatgattcttggcctctgttgcatttttacctcctggtgcctgcttcttacaccatcagtgccacctctccccatccttctttgtccgcttttgtgacccccccaagcctttggttaaagaataattcagccattcacaaaacttagaaatcatagaaaacatgagtgtgatccagcagaggagcgttgtctggttgtctcgtaaacattacagatgtggcagatccatttggctttactatgtctgtaatatatatgtgtgcatgtatacatgtgcacacacacacatcaaattacacatctatacgttaaaaaaatatggtgtttgtactcacatggccctaagctataaaatatcttgcttttcctggtactgaaggctttctgcttcctgtgttccttctacttttccataattgtaatctcagaacattcacatgacaccaaatgttaggtgtagttcaatgcctagaagtcagagcaagaaaaggagagatttgcctccatttcatagtttcctagcatgagaacatttatattgtcccttattatacacaagtcttccttgcattccccactgtctagactccaagatcttcggagagaggtgctgcttctcaagtctatccccaccttctctaatagtgcccagcacacaatttggtagatgaagtaggaatgcttatttactcgattgtttgtgtgtttgtgtgtgtgtgtatgtgttttgtttgcaaagagcagaaaaaggagtttattgtaggactacataagaactggaactggaaaaaaaaaatcaggatttcaaaacctgcccgctttctctccctttgaaactatctcacgtgacgaattttcttatctctgcgtatctgcccttctttcctttggtactcattgatccattccctccgtattccccaacctaaattctgactgcttaatgtagaatcctactacatttattggacaacatccttcttgttgggctgcctcatgggttgaatcccagtctatgattgagctaccttgggtcagatgcatattccagtctaatcagtaaccactcctgcctgaaaagactgcctggccttgctactttgaaggatgggggttggcggggagctgtgggaaatgcagttagagggatcaatagatgatgcaagagcattataattcatggcagagtgtccctgaaaaaaacggtgctagtacactgtagcaaagaaacaaaagggctactaactactgggtgattgttaccaagcccttcacatatgttaactaatttaacctttttttttttttttttggtggggggcagcgggggaggtatgcggagtctcactctgtcgcccaggctggagtgcaatggcgcgatctcggctcactgcaacctccacctcccaggttcacgcggttctcctttctcagcctcctgagtagctgggattacaggcgcctgccatcatgcccagctaattttttgtatttttagtagagacagggtttcaccatgttggccaggctggtctcgaactcttgtcctcaggtgatccacccacctcagcctcccaaagtgatgggatgacaggcgtgagccactgcgcccggccttaatttaaccttttatgatgtaatactagtcttgtcagatttcgcaaataagaatacaggaaggatacccgtataatatttaggatatacttatattaagaaattatttgtgatttttctgaaattcaaacttaactgggtatattctagccactctatctccattttacagatgaggacactgaggcaactcccctcaccccagggcacatagctaggaagtggcaaagccaatctggctggagtaccctgtactagccactctgctactctgctgcttttaagtctgtattaatggcaagcacgcgcgcacgcgcacacacacaactcctttatccttgccatcgtctttcaaagataagaatcaaagaccaaagcgtccttagatgttgtatcagagttcaagcaagggacagaaatcaccgcagaaatttggacagggaaaatttaatataaagaattgttgactatgtaaagttctgttaactactgaaaggggaaaaagaactctaagaagcagcaaggcagttaactgcagaaagtggcttctacacctaagactaagggaaaaatgaacaaggaaggaacttacaaactattggaaaaggtccctgcaaggctggattcagacctctgaggagagttcctggttgttacaggaacatgctgcctgtagtcctggtgccaaggaaacttgctgaagggtacccgctgttaaactgcatagggcagcctgccactgctgtaaaccctgaccgggataaccgcgtgccgatctgcctgccactatatgggaaaacagaaaactagatgaagaagaaaaaggcctctgtcttccagccatgcattgttccttccacactccttattgtcaaagcctaacatggagccagctggcaaaggaaaagtgtggcctgtagagttcagccccagtattacaaagcaggatgaagaaactgggattggagctgaaagacaataaattaataactgatacagatggaaagtacatttttcaacccaaggatagaaagaagccccaaacatcatcacacaaaaggaagacagattggctgagagaggcatttacattaaaaaaataaaatactgaaggtttacagggacacatctcttggagtagagcagcctacctccaaggtattggataagcaagacaaggtgttataaagcctattgtgtaaatatatacagaagactgagaggttttcaaccgaataaatgaatgcctggtacagcgttaatatagctgagaaattcatcctgtaacaagttgagtca

SEQ ID NO: 4 - DNA, 43726 bp, Homo sapiens
  source 1..43726: mol_type = other DNA
gagcaaggactcggggcccgcgcggcgcctctcggggccgggccgccgcctctgcgctcagccccgcaggccgggcatgggtgggggcgccgggccgtcacgatgagcgccctgggcagcccggtccgggcctacgactttctgctcaagttcctgctggtgggcgacagcgacgtgggcaagggcgagatcctggcgagcctgcaggatggcgcggccgagtccccgtacggccacccggcgggtgagcgcgggcggagggcgtgccggggtgcgggcgcggggccggggaggggcgcggggctggggagggggtgcgggtgggggtccgggtccggggacgcgagaccgggcaggggtcgggaagaggccggggcgcgtggccggggagggtaggagtcccggtccgggggcgcggggctgaggaggagcgcggttcgcgggcgggcctttctccgcccggccctggccctcgtgctgcggcgtccctgttgcacccccagttccactcgaggccccgcggcgcagtctccatccttctccgcagtctgcgcgcagcgggagcccgcggctgggccgggcgctgggctcctcccgacctggggccgctgctgtggggacccggggcgggggctcgagtccgcaagtgcgcgttcggccgcggggcaggaggggcgggaggggacgcgagctccggggctcctggggcggagcgcggcgagcaggcgcccaggtgctgggtctgcgcgtgggtcggaggggaggggagaccagggtccggtcccgaggccaggggtcccgcgtgtccgggggagaggaaggagcacaggtgactcgcgtgcggaagaggggaccccccacgacagcggccggagagcgggttccagggcgaggggaggccggagcgcccagagctcccaggcaggcagcccggggatcccccaagtttgaggcttgaaagccggcgcccggcgagggggtggacggctccggggaaagaaaggcgggggcaggaacccaggagaagggggaacgcgcagaggcgaacacctcggctgggagtgaggagcaggcggggccttcacccacgcgcatccctggaacagcttggacgaggccgaccctgaggctgtggaaggagcccagcctgtgcccaccttcctgccgcgcctcggggctgaacccacgcttccaacagagacccgctctgagtcctgggcggaggagggcagccgggcgtggagatggagtcttggtgggaaggacctgtcagctctggggcctgggaagggtctgggaagccccaggtccagggtcctgccagagacgaacttagcgggagagggtgggaggaagcgggatctgaggctgctcggtagagggtgcaggctgtcccctaagggcagctccaggcaggcggcgtgagcaccaagggagtgtggcacggctggagggggtggcctgagactgtggagcgtggggtgggactcaggtgcccggccacacctcagcttaggggacggggtgaggaatgggcagagtttgggggagcagctgagatgggcttgggctcacgaccagcacccagaggcctcctgaaactgcagcatgcgggggagtctctggcagctggtgggtgcagagtgtgctccgtggggcaggaggggagcctgcgtctctacctgtccccaggcgccgctgcccccgcatgtcctacccccctccccgctcggtggcaggtctctaggaccgtggtgtccagtaggatgccatgagccacgtgtggctgtggaagtgtaattagaaggaaagaaaacaaaaagcttccattcgtcacatttctagatagttcggatgtcgctgtggcaaagtccgagggccagcgctgccctggagattgagcgcctggaggacagggctggagattgagcgcctggaggacagggctggagattgagcgcctggaggacagggctggagattgagcgcctggaggacagggctggagattgagcgcctggaggacagggctggagattgagcgcctggaggacagggctggagattgagcgcctggaggacagggctggagattgagcgcctggaggacagggctggagattgagcgcctggaggacagggctttgtctgcactgtgccctcggggtctgggctcagtgagggatgaaccctaccagagctacaggaataaagcacccaacaacgtgtacgcccagacgaatatggcgctttaagagctgtgcgtgttttgggggagcagacggttgacagtgttgagtttgattgaaggtgagtgccgtggggcgtgtgtgagaagggtcacgcacagaatgtttgtgaaacttccttctggttggtttgaatggaggctcggggatgcttctgctgcgtgacttttggttgctacatgccgaactgaggacgaaccaaaacaatggtccaatgctttgtaataaaggctttcccttgacacggagggaggatttaggctaaaaatacacctcccaccgggccgggggcggtggctcacacctgtaatcccggctttgggaggccaaggcgggcggatcacctgaggtcaggggttcgagaccagcctgatcaacatggagaaaccctgtctctactataaatacaaaaattagccgagcatggtgtcacatgtctgtaatcccagctactcgggaggctgaggcaggagaattgcttgaacccgggaggcggaggttgcagagatcgcaccattgtactccagcctgggcaacaagagcgaaattctgtcttaaaaaaaaaatcccatcaagagctttattgtctacttggcctgagctgctgtagaaaaaactgatatcacgggtgtacccttgcaggtttttgatttaccaaatatttgttttagagttaagaaaagatattctgaaaaatagtaagaagttgagatcattatgttttgttttttattttttcagagacagggtcttctctgccgcccaggctggagtgcagtggtgtgattgcagatcactgcagccttgaccctcctgggttcaagccatcctccttttttggcctcctcaaatgctgagattataggcctgagccacagcacctggccatgtttttttttttttttaatgacatgtttcgctgagaaacactataggtgcttgttattgaaaggtgagggcagccgggcgcagtggctcacagctgtaatcccagcacttggggaggccaaggtgggcgggtcatgaggtcaggagtttgagaccagcctggtcaacatggtgaaaccctatctctactaaaaatacaaaaattagctgggcgtggtgccgcgtgcctgtaatcccagctacttgggaggctgaggcaggagaatcgctggaacccaggaggtggagggtgaagtgagctgagatcacaccattgcactccagcccagcgacagagtgagattttgtctcgaaaaaaaaaaaagaaagaaagaaagaaagaaagatgagggcgttcgtaactccacactccatttccctccacccaattcctcctgagttttgtagcccaggctgttatttttatattgtccaggtttatagcccttgcttctgtattgtggctgtagtgcccgcaatgatttagtatcaattcaacatttaaatacagtcagtgctcaccaaagtccttttaccatttatgtctctgttcattgtgctgtccctcttaatcacctagatttcattatcagtcgttttttcagaaggactcgagtatttcctgagtgtttttttgtgtctgagaatgtctgcccatggtctttatctttgaacaatgtagagatatcttggctgggtataatactcttagatttattttcttccccaacactttgcagctgtcattccaccatcccctggctcacatgtgctgtggggaagcctgaggtcagctgatttttccccatgtggaggcttgtccttcccttcatgaatttctgaggaattctttctttttgtctcatagttcttctgcttaaccagaccatgtctcagagttgaatgtttgtgttaaacttttagtatgaacgtactctttgagtttccaggtgtgtgtgtgtatgtgtgtgtgtatgtattttttttttcttagatgtagtctcaatctgttgcccaggttggagtgcagtggtgtgatctcacctcactgcaacctccacctcccaggttcaagtgattcgcctgcttcaacctcccaggtagctgggattacaggtgcctgccaccacactgggccaatttgtttttgtatttttagtagagacggggtttccatgttggccagggtggtctcgaacccctaacctcaggtgatctgcttagctcagcctcccaaagtgctgggattacaggtgtgagccacagtgcgcggcctgaatttttctgattatcttatgcctttcctatttgttggtaattttgatttcagtaaactgttctagctgtttctaacttattgattagttcagtaaagatgttatttttgtctcctaattttctcttagttttggagttttccttttttttttttttttttttgagatggagtctcgctctgttgcccaggctggagtgcagtggcacgatctcagctcactgcaacctctgcctcccaggttcaagcgattttcctgtctcagcctcctgagtagctgggactacaggtgtgcgccaccacgcctggctaatttttgtatttttagtagagacggggtttcactttgttagccaggatggtctggaactccgggcctaaggtgatctgcccgcctcggcctcccaaagtgctggaattacaggcgtgagccactgcgcctggccaatgtgcacttctgtgactgtgtctctggcccccgttatgtgaaagagactctcccatgttgtgtgaggctgtggggtgttaattctcatggtggtgacatcccttttgtgactctaccgtgatttattctccatcctgcgggtgacgggcatttgggtggtttcaggtttctgactattatggtttgttctgccatgaacattcctagtacacatcctttgcatttctgttgaaaggtccctatgcgtgtgaatcgctgggtatcaggcacgcaaatgtctgcacaggtttccctgtagtagattctcgcaaagcatttttcacttggtgctcccaccagcaaagctggaggccccggctgcatcatcttccctctcagcacggggctgtctctgtccttctgtggtgtgtagtttgcctttgcatttctctgatgactgagcaccttttcatacgtctatgcgaaattcctctttggaaaaatgcccaagtcggccgggcctggtggctcacgtctgcaatcccagcactttcagaggccgaggcggatggatcaccagaggtcaagagttcgagaccagcctggctaacttggtgaaaccccatctctactaaaaatacaaaaaaaaattagccaggtgtggtggcgggcacctgtattcccagctactcgggagactgaggcaggagaagcacttgaacccgggaggcggaggttgcagtgagctgagatcgcaccactgcacaccagcctgggcaacagagtgggactctgtctccaaaaaaaaagaaaaaaaatagaaacagaaagaagaaaaatgcccaagtcttatgtctgttttttcatttaggttgaatttctttcaatgcttgctaggagtgtttaaaatatagattctggctgtgagtcctttgtcggctgtgtgatcctggatagccactctcatctgcacgtcacctttccactccttcagtggtatttttggatgaacagaagctcttaattttaacataatccaaattatcagtgttttgtggttaggactttgggtcctgttgaacaaacctttgctgctcccagatttaaaaaaaaaatgttctctacaagcatcgttttacctttgacatgaatggctgcctccagctggggtgaggcctgaggcagggatcgagacacacttttttcagtcggatgccccccacccccaccccgcatcgcacggccaccgttgtcccagctgagagcccgcctgtgggtctgggtctgcaccgttggcccgcctgtctcttgtgtgtgtgccccgggtcagactctgtcttctgtggatgggcatgccctgtgctggccagggcagtcagatgcatcttgtccttgctcaggcagctgtgcccaggtgttccctttgctccgatacggtcagcgaggcctggattctccctcctgggcgtttgtcttcctctcggtctgtagttgcagggcagagttcttggatcttggaccctgtcggcaacttgactccacagactatgtggaccccactgctctgcctgtcacctcagcccacggaccgtgcgggccccactgctctgcctgtcacctcagcccacggaccgtgcgggccccactgctctgcctgtcacctcagcccacggaccgtgcgggccccactgctctgcctgtcacctcagcccacggaccgtgcgggccccactgctctgcctgtcacctcagcccacggaccgtgcgggccccactgctctgcctgtcacctcagcccacggaccgtgcgggccccactgctctgctggttacccagggaagtgtcttctgttctgcaacacacctcacacacgctggtacccctggttcctggtggcctggaccccatttccgtctggcagctgggtccccggttcacgctctttcccctcggaagttccatttctctccaggcaggggtagaaggaaggcgtcaccaggctggcccaggatatggtcggggcacagcagggccctgcctttccgccaccccagctggtgcttccaacaccagattgtgtcccttctctgagtgctgagttttctgccttttgcccatttttttgttgttgttttttgagatggagtctcgctctgtcgcccaggctggagtgcaatggtgccacatcggctcactgcaacctctgcctcctgggttcaagtgattctcctgcctcagccccccgagtagctgggattacaggtgtaccatgcccggctaatttttgtatttttagtagagatgggggtttcaccatgttggtcaggctggtctcgaactcctgacctcaggcaatccgcctgcctgggcctcccgagtagctgggattacaggcgtgagccaccgcgcccggccttttgcacatgtttattggtgacagggaggggggtggattaactacaccagatgccaccacctcttgcctcccacccttttccccagcatgagggcctcattgtcttctccaatcctttctcctggctgtttcttcagtgtccttttcccagcataaaagtcccattgttctttctttgtttcatttttgctaagagctaataataataaccctcacttactgagagggggaatcatcttgagagaggttatattgtgaggcccagagaggctgagccactccctcaagactacacggtgcgtggacacaccggggtgcaggtgcagggcctggccctcccctctgtttccaatgtttaatgttgggagaaggctccactgagggagcttttcttcccggagacgagcatcagagcctccgttatggaaagtgacacagttgctggggtttgctccttcctctttgccttggacagatgttcccctgggacatgcgtgcccactccatgctcccccggggcaaacgtgcacactccgtctctctccaattctgcagatcttcccctggacacacgtgcacactctctgttccccaggaacacacatgcacacttcatctccctccaattctgcagatcttcccctggacacacgtgcacactctctgttccccaggaacacacatgcacactccatctccctccaattctgcagatcttcccctgcacacacgtgcacactctctgctccccgggaacacatgtgcacactccatgctccctccaattctgcagatcttcccctggacacacgtgcacactctctgctccccggcaacacacgtgcacactccatgctccctccaattctgcagatcttctcctggacacacgtgcacactctctgctccccggcaacacacgtgcacactccatgctccctccaattctgcagatcttctcctggacacacgtgcacactctctgctccctgagaacacatgtgcacactccatgctccttccaattctgcagatctccccctggacacacgtacacactctctgctcccaggaacacacatgcacactccgtctccctccaattctgcagatcttcccctggacacacaaacacactctctgctccccgagaacacgtgtgcacactccgtgctccctccaattctgcagatcttcccctggacacacatgcacactccatgctccctctgattcttcagacagaggtggatttgctgattaatacagctactcttctggtttcccttggcaaccacctcgagatataaaacacgatttataaagtcatcactttcaagtttgaactgaaagtcaaatcatattttatcctgcttctttatagtgcagtccttaaggaggagatgatggttttctacttctttttttttttttttgagatgaagttttgctctgtcacccaggctggagtgcagtggcacgatctcggttcactgcaacctccgcctcctgggtccaagcaattctctgcctcagcctcctgagtagctcggattacaggtgcccaccatcacgtccagctaattttttgtagttttagtggagacggggtttcaccatcttggccaggctgatcttgaactcctgacctcgtgatccacccgccttggcctccgaaagtgctgggattacaggtgtgagccacgtgcccggccagttttctacttctttacctcctgcggtaccacttgtgagaaaattaatttttaaaatacattaaatgtctctatgcatttgaaaataacaccattgcattgtatcaagttttgccattagaagccctcaattcggccccacctcgcctgtgtcctgcagggtcctctccccgccctgatgaccatcctttagcttgacctgttacttctgtaaccccagccccaggtgaacctgatttccagtgacaggctgggagaggctcaaagcaagccagccaggtttctccaggcagagagagggtcagctctgggggctggaggcccacccatcgcccctgagtcccctgtcaccagcctgtccaccagcctggcaccaggcaccaccgtggtgcagagtggacgcagctggagcaggcagacccgcagtcctgcctcatcctgccagccgcacctgctcactgctcctcctgccccaggagtgcaggctgctccgcgctgggtgcatttggagtgaagacagtggcaaggggcgtcagaggcaacagtggaatcagctggtatgtgctggctgtgggtactgttcacattcagagatgtttttaacctttattttaaactttattcccaggattcttcagcttaattagctctatatacacaaaacctgaaaagaacaacagcatccaaagggcttgggcataaaaatattagagatctagactttatcaaacaaaacaatttttaaattttttttgagacagagtcttactctgttgctcaggctggagtgcagtggtgcgatcttggctcactgcaacctctgcttcctgggttcaagcaattttcctgcctcagtgtcctgagtagctgggattacaggcatgcaccaccatgcccggctaatttttgtatttttagtaaagacggggtttcactatgttggccaggctggtctcgaactcctgacctcaggtgatccacctgcctcagcctcccaaagtgctgggattacaggcgtgagccaccacgcccggcccaaacaaaactatttgtttatttatttatgtatttttgagacggagtctcgctttgtcacccagctggagtgctgtggcgtgttcttagctcactgcaccctccgcctcccggcttcaagcacttctcctgcctcaagcctcctgagtagctgggattacaggcgcctgcctccacgcctggctaattttttggtatttttaatagagatggggtttcaccatgttggtcaggctggtctcgaactcctgacctcgtgatctacccgcctcggactcccaaagtgctgggattacaggcgtgagctaccgtgcccggcccaaaacaatttttaaaagtggtcatgagggccaggcatggtggctcacacctgtaatcccagcactttgggatcgcttgagctcaggagttcagaccagcctaggaaatatagggaaacctcgtctctacagaaagtttaaaaattagctgggcgtgatggtgacttagtgtgttttgggccccggctggcagagagaaggatggactgatggacgctcagcaccatgaaatgaaaactttcagggatgtaaagtcttttttgaaaccgggtctggcttattgcccaggctggagtgcagtggtgcgatcacagcttaatggagctttgacctcctgggctcaaacagtcctctcacctcagccccccagttggctgggactataggtgcatgccaccatgcccggctaattattttatttttagtagagagagggtcttgctatgccgcccaggcttgtcttgaatttctgggctcaagcgatcctcctgcctcagcttcccaaagtgttgagattgcagacatgagccaccgcgcctggctgggggcgtaaagtcttgaaggcacctgccctgcatgatcggcagccagtcaggagggctggttttccaggaaccctgtgcttgacttctcagtctctccgaggatgccagcacctctcacagaagctggcggccatgtcctggagagagagccccagaaagctgtcagtggagaacaacgaggccattgtaacagatcttggggttttctcagctaggaatgagcctcaggctgtttttactttatgtgggttacgtatctcaacttcttgcagctaataattaattaattaccctccccctaatgtgactcagcaaagtttgctcctgaatttgaatcaactggtgtgttatttatatttgtgactcgtgataggactggcattttgtttgactaaaaataaaagcaaaaacaagtttacagaggcataaatatacatattaaactttagtgaccctaatacataaggccagaagttattatcttaataggaaagagtaaatagataagtatgaagagtatgaaattttctcttagattaataaaattcatctggaaataaagtctgtttcttccagctcaggaggccacgtatgtttgaggagagaacactgtggtacactcacgggttcaaattgcgtcgtgttggtttgactttggagagacatagaggccagcgtcatcagatctgggcatcatcgggggtgtgggggggcccacagacaagagtcttccatgcccttgacctctgagcacccttccccccagcactggacaggagggtctttgatacccctgagctctgagcctccttccccccagcactggacgggagggtcttccatgcccttgacctctgagcacccttcgccccagcactggatgggagggtcttccatgcccctgagctctgagcatccttccccccagcactggacgggaggaacgtggaggaaggtggggggctccagagctgctgagtgaagtggcttttggatgggctgctgtgactaatggaaaagagctgctgagtgaaggggcttttggacaaattgaaacagagatttattctctcacagttctagagaccagaagcccagaatgaaggtgttgcctgggccacgctcccttggcaggctctaagcggggacccttcctgactcccctgacttctggggtgctgctggcagccctcggcgttctgtggcctgtggcagcaccgttccagtccctgctgtctgtcgtcacacagccttctctcctgggtgtctgtgtccccaaatctctctgtgcttataagaacactagccattggatttagggcccacctaactcagtatgacctcatcttaacttgattacatctgaaaagacccttggccgggcgcggtggctcatgcctataatcccatcactttgggaggccgaggcaggtggatcacttgaggtcaggagttcgagaccagcctggccaacatggggaaatcccatctctactaaaaatacaaaaattagctgggcgtggtggcaggtgcctgttatctcagctgcttaggaggctgaggcaggagaatcacttgaaccccggaagcggaggtttcagtgagctgagatcgtgccactgcactccagcctccagcctggatgacagagtgagactttgtctcaaaaaaaaaaaaaaaaaagaaggctgggtgcggtggctcacgcctgtaatcccagcactttgggaggccaaggcgggcagatcacgagttcagcagtttgagaccagcctggccaacatggtgaaaccccgtctctactaaaaatacaaaaattagctgggtgtggtggcgggcacctgtaatcccagctacttgggaggctgaggtaggagaatcgtttgaatccaggaggtggaggttgcagtgagctgagatcgcaccatcgcactccagcctgggtgacagggcgagactccgtctcaaaaaaaaaaaaaaagaagaagaagaagagatcctgtttccgaatcaggtcacattctgaagttctgggtgaatgtgagcctttgggggacacttcaacccagtatagatagatggtgaaacccgaaaggacagtttcgttctcatgaaggaagagctgggcacccagggaccctgtgggtcccctcttcttggagcttcagcactggagcccctggccctgttggttcctgttggctagggccctggaggggcccctaggacctgccctggaggcaggccgggtgcctggggcccgccccatctgagcgtttcactgctgggctgtctccttgggaccctacgggctacacagctcattctgccggtcgtccatgcttggggttggagcactgaagcttcgtccctgtgtgcggtgaaggacttggtgactccaaggaggccccaggaatctgcgttcagttgagtgcacggccacagttgaggaccactgcgtgtgctgtctctttctgtggtgtttctcctcctcctccctccccaccctccttttcccttctggcccacttccccctccccctccctcctccgtcctccctccccctccccattcctttcctctcccgcttcctctctgcttttattgagatatggtttacttacagtaaaatgtctcccttcttgagtttttttgttttttttttccttttttgagacagagtttcactcttgtcacccaggctggagtgcaatggtatgatctcggctcactgcaacccctgcctttggattcaagcgattctcctgcctcagcctcctgagtagctgggattataggcgcctgccaccacgcccgggtaatttttctatttttagtagagatggggttttgccatattggccaggctggtctcgaactcctgacctcaggtgatccacccgcctcgacctcccagagttctaggattacaggcgtgggccaccgtgcctggccccgtcttgagttttgacaaagacagtggtgtgaccgccatcacggtcaaggtggagaacacctccaccacgcagaagtttccgcagcctctttgtaggcagcccctccccaaccccacctcctcagcctccaacgtgcctgcatcccggaggcctttgaacctggctccggtcactcagcagccctgagcctctgaagccatctgacttgtcaggtgcaccaagagctcattgcttttgattgtgggacagtagagatgaaccacagtccatcacccacccaccctctgaggagggtctgggtgatttccagcttttggcgatctatgaaaaaagccactgtgcatgtttatgactcgtttttgtgcgaacttgtttttatttcacttgggtaaatatccaggggtggagttgctaggtcatatgataaatgaatgattaactttataagaaactgccaaacccttttccacactgaccacaccgtttgcatccccgtcagcagtgtgtgagtgtttcagttgtcaacattctttggttttgttttttttaaatgttagccactcatgggtgtgcagtggtatctcattgtaattttttttttttttttttgagacagagtctcactctctcacccaggctagagtgcaaaagcgcaatcttggctcactgcaacccctgcctcccgggttcaagcgattctcctgcctcagcctcccgagtagctgggattacaggtgcctgccaccacacccagctaatttttgtatttttagtagagacagggtttcaccatgttggccaggctggtctcgaactcctgacttcaggtgatccacccgcctcggcctcccaaagtgctgggattacaggcgttagccgctgcgcccggccagtatcttattgtaattttaatttgcatttcctgtgctcatctaccatcctcatattctctttggtgaagtgtcttttcagatcttttgcccactttttcttttcttttcttttcttttttttttttttttttggaaacagggtcttgctctgttgcccaggctggagtgcagtggtgcaagtcatagctcactgcagtctccacctactgggctcaagtgatcctcccacctgtttccccagtagctggactccaagtgcacaccaccaggcctggctaattaaaaaaagaaaagttttgtagagatgagggtctcactatattgtccagactgcccttgagagatcctcaagagatcctgggctcaagagatcatcctacctcggcctcccaaagtggtgggattacagttgtgagccactatgtctggcctcttttgcttattttgaaaaacctgaattgtttattttctttttattgaattttgagaatgtttaaatacgttttggatgtaagtctttacccagaaatgtgttttcaagtattttcaccccatctgtgccttttctttccatttagtatcttttaaagaataagagtttttacttttgaagaaatccagttgatcagtttttttcttttatagaccatccttttaatgtcatatctaagaaatctttgcctaacccaaagtcacaaagattttcttctagaaattttataattttagattttacatttatgactatggtccattttgggtttttttgtttgtttgtttctttgtttgtttttgagatggagtctcactctgtagcccaggctggaatgcagtggcatgatctcggctcactgcaagctccatctcccggattcaagcaattctcctgcctcagcctcccgagtacctgggattacaggcgtgtgccaccatgcccggctaatttttgtatttttaatagagacagggttttaccttgttagccaggatggtctcgatctcctgacctcatgatctgcctgcctcggtctcccaaagtgctgggattgcaggcatgagtcaccgtgcccggccgggttcgttttttaatatagtgtgaggtatagattgagattcgttacttttgcacagggatgtctaattgttccagcagcatttgttgaaaagactattctttattgtatggcctttgcactttggtcaaacatcaattggccatttttgtgtgggcctatttctagactcaattctgttccatttttctattcagtattttttataccagtaccatactgtgttgattaaatatatagtaagtcttgagtttgaggagtctgagtcttccaactttgctcttttgactttccttttaaatgttggctttgttgatttctaccaagaaaagtcctgctaggatttttgattgggactaaaactatagatcaattggggagacttgtcatcttaacaatactgattctgtcaatcatgaacatggtatgtctctccatttatttaggtcttctttgattccttttattagtggtttgtagcttttaatatataagtcttgcacttttttttagatttatactcaagtatttcatggtttgggggctactgtacctagtgctatttaatttcaatttctgattgtttactgctagtatttaaaaatacaactgtttttttccatgttggccttgtatattttgatcttactaaattcacttatgagttctaatagctttcttattggtttttggagaggtgtatgtgtgtgtgtgcatgcgtgcctgtgtgtgtgtgtgtgtgcatgcgtgtgtgtgtgtatagtaatgtcatctggtaatcgagatggttttaatctgcatgccttttctttctttttgttgccttattgccctggttataacttccaaaatgatattgaattggagtggtaagagtggatattttcatggggaaaatattttctcattttcatggggaaagcgttctgttttttaccattaagtaaaatgttagctttgaggttcttttttttaagatgcactttatcaggttaagggaattgtattcctagtttgctgagagcttttgttgtgaaaaggtattggattttgtcaaatgctgcctcactgagatcatgtgggtttttcttttttgatttattgatgtgataaattgcattgatagattttcaaaggtcgaaccaaccttgcattcctacaataatagattgccgaatttggtatattttttattgatggagttatctcttttactttatatttttacttttaatttattgtatagtaagttattttaatgattggaatcacagtgctagagaaatcccccatctgagcccagttctggtggctccaaagcctccacacagagccttgagatgctttgctgcagggttgcttgtttcgcactcagagcctgggttgctgagtgaggctgtgctcatccaagcagaggggcttttttccctacccagtgtctgactgcactggttaactactgcttcctgtattaggagacttctcccagacggctgcttctaactgttcagaggtattactctcgtttgcctttttgtctagaaatgtaatatttcctaccataggtaagttatgttccctaggagagccagcaatctttgagttatataaattgatttttagccaaatcttcactaaggagttgggggtgggggagctcatttaccacttacctaccaaaaactcatgttttttgagttaatatattaccacatgtagtgttttggcaactgtgttcaatgtatatgaagcagatatatttgccttcatttttagctaattttctctcaaacatcattttcttttctctttcttttttttttttttttttttttttttttttgagatggagtcttgctctgttgcccaggctggagtgcaatggcgcaatctcagctcactgcctcccgggttcaaatgattctcctgcctcagcctcctgagtagctgggactacaggtgcacgccaccaagcccagctaatttttgtatttttagtagagacggggtttcaccatgttatccaggctggtctcaaacccctgaccttgtgatgcaactgcctcagccttccaaagtgctgggattaaaggcgtgagccaccgtgcctggcccagaaattatattttagaattaaaacatttgtatcaatacttcatatgaaaaatgttaaaattacatatatcattataggtattactactaggtagaaagaaaatcatatatatacataaacagtgaaatgaactacactgaaatattaatcgtagttgtccatgggtgataagattgtagtggtaaatatttagtaccaagcatgaatgacttgattttaaataagctttttcatatgcgatattttttttaacttcagaagcaaagagtgtcaggcagccttggtggggtggcctcctggaaccctccagcctccagccaggactttgagttgagaagctcacacacgtgggggaactgccgtcccgtcccccgagcggccccgcccagagcccacacccctctttggcaggtcgtggccaaggtgggtggggctcctgcctgcgacccagggccagggcaggactggatcctatggccactcccctgggtgtatgggaacctaggagagacccaggccccagtgtggggtccaaggctgcatgagacctccgtgacagaggtcaccccaccctgagagcccgggcccgcctgagttgagccctcgaaccctgccaggcctccggtctgagcaggacgggccagcccgaggacagctgcccccttctcaggccctgggagttgtggtcacaagatgtccagccccacaaccagcctcagggaatccaccactctgatgggttgtgaggggagctctgggatctggcccctctgtccctcccacagccactgtggctgccttgatcccccttccccaagacgatgtctcttcgtgagcctcccacgactgcgttcaccccgcagcctgctcgggcagcagctgccacgctccaggacactgcttctgggccgtgttccttcgtgtttccaggtgtcctgtggtggtgacagctcagtggaagctggcccctgccctgtgcttggtggaggctgccccctgccctgtgctcggtgacctgcaggtgcttagtgactgggcggggcagcagtggccgcacagggttggcgtggcctctgcagcacttgtccagcctgatgctggtcccaggcctcaccttttgggagtttagtgtcctaagacaaaggtgatttaaataaataaggcttgtggcggccgggcgcagtggctcccacctgtgatcccagcactttgggaggccaaggcggatcacaagatcaggagatcgagaccatcctggctaacacagtgaaaccctgtctctactaaaaatacaaaaaattagctgggcgtggtggcaggcacctgtagtcccagctactcgggaggctgaggcaggagaatggcgtgaacccaggaggcggagcttgcagtgagccgagattgcgccactgcactccagcctgggcgacagagcaagactccatctcaaaaaataaaataaaataaaataataataataataataataaggcttgtggtgtccttcaggctaccggagaaggtggttgctggtgggcgcgagctgctcctgactgttcagaaagggagctgctcagtggttcacgcctgtcatcccagcactttgggaggccgaggcaggtggatcacgaggtcaggagatcgagactatcctggctaacacggtgaaaccccgtctctactaaaaatacaaaaaaattagccaggcgtggtggcaggtgcctgtagtcccagctacctgggaggctgaggcaggagaatggtgtgaacctgggaggcggagcttgcagtgagccgagatggcgccactgcactccagcctgggcgacagagcgagactccgtctcaaaaaaaaaaaaaaaaaaaaacgcagaaagggagctgctttcacaaaaaccacacacttaaagtcagatgtgagcattttacggtgcaggtgtaaagcggcgttgaatcaccaccacactgcagcgtcagcaccggccacttccaggagccctgtgctgtccagtggccattcgccctgcccctcccctctgccccggggaccgccagtctgctttttggctttccggtgttttaactcaacataagacagatttctcaaaagctgggctgagagatgaatacgtctgtacattgtattgaatcaatatttgcaccatcaacagatcctcgcttgtgaaggcggttatgccacttactaaaatagaattaagcaggtggtagatgacttaaaacagattcctaaaatatttactcattatgcagctccaagtgtagagaatggtgtggcatttgacttctcccttttttgttcttgttttttagaaggttaaaattatctttttgtccctgttttctgactcactcagtgaacattctgacgggctttgttctagaagctttgtatatctttattatattttgatggacagagtacatggtaagttaatcagctaagtgcagtgagcttgaattgtattatcctaacgctaacactgctgatgtcaaaaatgtttcttagtttctcgtggaccaaaacgtaaggtaacacagagaaggagaaacggtaaataacgaaagagcaaacacacagatgggagataaggtaaaaaacaaaaacaaaaacaaaaaaaactgcaaagactgaaacaaaatggctccatcaatgggcttatgaaaagaagagtcttctcacaaattgaatttgaacatagctatgaaaggatatggtttgaggatttctctaggcagacatggctgcgttagagggtttatctttggaacagcattgattttagagaaaaaaagagagacttgaaatgagtttggtcgctgctcgctgggcccagtgtccagacgttctgggctgtggctgagggatggagaagaggccccgggtcaggtgcaggggtcgggcaggtgcagcaccgcagcatcactgacgccctcatctggggtcagagggccccacatccgggggttccagcagacttcaagtgtcctgcgcaaagaggatgcgggctctgtgtagggccaggccacctgtgcctggaaaccccaaacgcttgggtgctggccctggagacgggtggtggacgaggattggaaggtggacacgggaaggcagggttcccactgggaaaggccgagtccacagggacagagacgcggcgtcagggctgatggagagccacaacacaggccgcctctgggcctcggacctgtggcaagggggacacatcagggaagggccagagtgtgttgagctggccgctgcaggatgggccacctcctggaagcagcccggcttgtaatgctttctgccctgttgggacgggagaaaccagtgattggttttagctctttctgaggggaatctcattgtaatgagcttttacgatgggctgagaacctgggacttggaagaaattcagcttttagttcaggtattaattcagagatagcttgaacattaattgtttaaattagtaggctggccgggagcggtggctcacgcctgtaatcctagcactttgggaggccgaggcaggtggatcacgaggtcaggggttcgagaccagcctgaccaacatggtgaaaccccgtctctactaaaaatacaaaaattagctgggcgtggtggcgggcgcctgtaatcccagctactcgggaggctgaggcaggagaattgcttgaacccgggaggtggagcttgcggtgagccgagatcgtgccactgcactccagcctggacgacagagtgagactccgtctcagaaaaaataaataaataaataaataaattagtaggctaccggccgggcgcggtagctcacgcctataatcccagcactttgggaggctgagacaggtggatcacctgaggtcaggagttcgagaccagcctgaccaatatggtgaactctcatctgtactaaaataaaaaattatccaggtgtgatggcgggcatctgtaatcccaactgctggagaggctgaggcaggagaatcgcttgaatccaggaggcggaggttgcagtgagttgagatcacgccattgcattccagcctgggcgacacagcgagactccatctcaaaaaagaaaaagaaaaagaaaaattagtaggccactgaagcagagatgtcaaactggcgggggtaagcctcaaaacaggacccatccgaatgcaaagggaatggtgctttgtaggggtggctgggaagagccgagagactcgccacggaattggtgtgtgggtgaggagaggctgttgaaggtcgggggtgccctgtgtggggggggagaggctgttgaaggtgaggggtgccctcactctgtgggtgaggagatgctgttgaaggtgaggggtgccctcactgtgtggggtgaggggaggctgttgaaggtgaggggtgccctcactgtgtggagggagaggctgttgaaggtgaggggtgccctcactgtgtgtgggggagatgctgttgaaggtgaggggtgccctcactgtgtgtgaccacagaggtttggggaggagttggagcctttgctgagctgacgtggactgctggcagcaggtgcacacattttgaggagctgtggtgagtgcgtcccacgaggcggtcggttccccattcatagccagggaaacggagacccgggggagatggacgaagacattggtgttgggactggatttgatcccaggccccaggctgcagcgtctgtgctttaccagccctgtggggtcctcaccgtcccgtaccaggagactcagagtaccaggggcttcaggtcgtcactgttgccacctctcccccctggtgagaaggacccacgtagcagatggagggcactgttttttaaggttttatctccccacccgcctgcaagagagtgaatgtttgtgacccccccaaattcgggtgctgaaacctaaccccaaggtgatggtgttagaagatggggctattggaagatgattaggtcacgtggggctttgtggatgggatgagtgaagcatccaagagctccctcgcccctccagctaggggaggacatggggagaagacacctccatgaaccaggatgcagccctcgtcagacactggctctgcctggaccttgatctagaacttccagcctccagaactgtgatgacaagtttctgttgtttaggagctgcctagcttatggtattttcattatagcaaccccactggctaaggtactaccctaccctgccccacccccagttctgaagtatggggtaaagggagtgccatccacgggagcagaatagattcgggagaagggccaagtgctgctgtgaaggaagccagcgcttggtggagaccacgtcagacaggcggctgtcattgtcctttcaaagctggtcatttgccagggcaggttgtgggtgtgggttatgcatccgggctgtgctaatgggaactgccagctgaagaagacactgagtccagttttggtcatgatggtgaataatgaaatcattatcactgagttcgattttatttccagttcttgtttattgttagtgaaattccgggatgtggaggtcattgtactttgcttggggaagatgtgaaaatgcatcctttgtagcttttcccagtttagggggtgtcagatgttttctctctctctctccagtcattgtgctttgtgggttttctaccagacattttggtgcaaacaagaaaattaactcaaaatagcttcagcacagaggaatgtggtgccccacacagccggcaggttgaggggctggtgtagtttcaggcgtggctggattctggtgcctgaacgatgccgtcaggattatctcgtgttgttctttctcctctgcctactccctgcacacaccctggccctgctttcttctgtgttaggttcattctggggttcgttcttcccacctggtgaggaagctggccggcagcaactccaaaccatacgaacgttgcctgcgatgccagagtgacgcaggtgacaaggaggcccctcccccgttcagtcagtcattccccaggtgttttaggttgctttttcttttcttttcttttctttttttttttttttaagacgagtcttgctctgtcgcccaggctggagtgcagtggcgcgatctcggctcactgcaagctccgcctcctgggttcacgccattctcctgcctcagcctcccgagtagctgggactacaggtgcccgccaccacacccggctaattttttttttttttgtatttttactagagacggggtttcaccctgttagccaggatggtctcgaactcctgacctcatgatccgcccaccttggcctcccaaagtgctggggttacaggcgtgaaccaccacgcctggtcttttcttttgagacggagtttcactcttttttgcccaggctggagtgcaatggcgcgatcttggctcactgcaacctccgcctcccagcctcagtgactctcctgcctcagcctcctgagtggctgggattacaggcacccgccaccacacccggctaattttgtatttttagtagagttgggctttgaccatgttggccaggctggtctcaaactcctgacctcaggtgatccgcccgcctcggcctcccaaagtgctgggattacaggcgcgagccaccgcgcctggccaggttgttgcgttttctagtttgtccagtgttgatagtcacaaaataagaaagatcttggacattgaaaacaataatttcaaagaagggataaaagttaaaatgagatgaattcccagaatgctgggaaaaagagagagagatgcaaaatcagacaagaaaggtgggaaacaggctcaggaggcccagtatctgattaatcacatcccagaaggagagaacaaattatccaagaaagttccccaaaattgagatttgtgtctccagattgaaaggcccatggagtggtcagcctggccacgaagatccctacagcaaggcccacaaggtgtgcagtttcagagaagcgcctccatgcccaccaggaggaaaaccaggttgcattcagagggtcaagaatgagtttacggccgatctcaaaaggaactctggaatgactgaacgtgtttaagggaaaagcatcttctccctcaattgtatgcctgtccaaacacaaggaagagtgagggcagcctaaagacattttcagacgtgcaaagtctcagatactaccttcttccatgcacctttctcaggaattgaaaagaggagtcagcttaagagagggaaggatggaatccagcagtaagggagtgggggccccagggcaacagtcctcccagtccagatgggagcaggacagaaggtctggaaagatgccccaaagaaagtgaaattcctgaatgtttgcaggtaccgagagcagatttagatagttggggaaaattacagtgatgaattagtaataaatgcagagaaaactgaacaagtaaacaatgagtaaacaacaagtaaacatgaggcaattttttttttgagacaagagtctcactccatcacccaggctggagtgcagttgcacgatctcagctcactgcaacctccgcctgccgggttcaagcgattctcctgcctcagcctcccaagtatctgggactacaggcgcccaccaccatgcctggctagtttttgtatttttagtagagatgaggtttcaccatgttggtcaggctgctctcaaactcctgacctcagatgatccacctgccttgacctcccaaagtgctgggattacaggcatgaaccatcacgcctggtacaatgaggcaatttttaactccagtagaaacaaaaattcgtacatgaaggaaaaataaacattgtataccatatggtggttcagctgtggatggcgtctacctggtgtcattttctgttgctgtaacagaataccacaaactgggtaatttataaagaaaataaatgcatttcttacagttctggaggctgggaagtccaaggttgaggggctgcatctggggagggcctcctgctgcgtcataacctggcagagggcatcgcgcaagcccgtcagctcaggtgtcttcctctccttgtaaggccaccagtaccatcatcagggccccaccctgctgaccctacctaatcctaattacttggcaaaggccccacctccaatcaacatacaaactggaggtttacctttctaacgtgaagtttagcggacacattcaaaccatagcacctggttatgacagtgtagaatggaatatccatctagcttaaaaagcaacaaaactgtacagggagcgtgtgagtgtgtgtgttagagttacaggggtgaggtgtgtcagtgggtacagggagcgtgtgagtgtgtgtgttagagttacaggggtggggtgtgtcagtacagggagcgtgtgagtttgtgtgttagagttacggggtggggtgtgtcagtgagtacagggagcgtgtgagtgtgtgtgttagagttacaggggtggggtgtgtcagtgagtacagggagcatgtgagtgtgtgttagagttacaggggtgagctgtgtcagtgggtacagggagcgtgtgagtgtgtgtgttagagttacaggggtggggtgtgtcagtgagtacagggagcatgtgtgtgtgttagagttacaggggtggggtgtgtcagtgagtacagggagcgtgtgtgtgtgttagagttacaggggtgagctgtgtcagtgggtgagtgtgtgtgttagagttacagggtgagctgtgtcagtgggtacagggagcatgtgagtgtgtgttagagttacaggggtggggtgtgtcagtgggtacagggtgtgtgagtgtgtgtgttttagagtgacggggtggggtgtgtcagtgagtacagggtgtgagtgtgtgtgttagagttacggggtgagctgtgtcagtgggtacagggagcatgtgagtgtgtgttagagttacaggggtggggtgtgtcagtgggtacagggtgtgtgagtgtgtgtgttttagagtgacggggtggggtgtgtcagtgagtacagggtgtgagtgtgtgtgttagagttacggggtgagctgtgtcagtgggtacagggagcatgtgagtgtgtgttagagttacaggggtggggtgtgtcagtgagtacagggagcgtgtgagtgtgtgtgttagagttacaggggtggggtgtgtcagtgagtacagggagcatgtgagtgtgtgttagagttacaggggtggggtgtgtcagttagtacagggagcgtgtgtgtgttagagttacagggtgaagtgtgtcagtgagtacaggatgtgtgtgagagtgtgtgtgttagagttacaggggtgaggtgtgtcagtacagagagcgtgtgagtgtgttagagttacggggtgaagtgtgtcagtgagtacaggatgtgtgactgtgtgtgttagggttacagggttggggtgtgtcagtgagtacagggagcgtgtgagtgtgtgttagagttacgggggtggggtgtgtcagtgagtacaggatgtgtgtgactgtgtgtgttggagttacaggggtggggtgtgtcagtgaccgagagctacattttcatcttctgtagtggaaagtcagtggatgcctaaaactgaaatgtcaggaagtaggaatgtaagtatgttcttcatcaatctggagatgcatagcaaaagaagttattttaaaggattaaaatggggaagggagacaggggttcgggtgggccagggtccaacatcgtggatcgtgacagcacttcagactgtgagcatccatgactccatgaaaacagaaacgaaagatggttttgaaactcgtagggcgcttaaaaagaccatcaggaagccgggcgcggtacctcacacctgtaatcccagcattttgggaggccaaggcgtgcagattacaaggtcaggagttggagaccagcctggccaatatggtaaaacccagtctctactaaaaatacaaaaatgagccgggcgtggtggtgggcgcctataatcccagctactcaggaggctgagacaggagaatcccttgaacccgggaggcggaggttacaatgagctgagatcgcgccactgcactccagcctgggcgacagagtaagactccgtctcaaaaaaaaaaaaaaaaaatcaggaattcttttacatttatgaacacattttaaagttgtttggcccttggctgggcgtggtggctcatgcctataatcctagcactttgggaggccaaggcaggtggattacctgaggtcaggagttcgcaaccaacctggataacatggtaaaaccccgtgtctactaaaagtacacaaattagcttggcttgctggcgtgtgcctgtaattccagctacacgggacgctgaggcacgagaattgcttgaacccggtgggcggaggttgcagtgagcgagatcacgtcactgcactccaggctgggtgagagagcgagactctgtctcaaaaaaaaaaaaaaaaaaaaaaaaagattgttggccctcaaggacaggtcaagaggatactttctaagtcagaggacccagccaagctcaggcagtggattaatctccggaaagacaaatatgagcctctcagcccgtgggggtgagtgtcccttcgtctggagacagacatatcaaagctggagttatctccgcattcgaaaatagattcccaagtgtattcgttcattgcctcgtgcctgccaagggaaaataaatatttccaaaattctctttgaggattgctattatggagcaaatatgtatgttcttttttaatttattgtttgtgtttcacgctcagtgtgttcattgctgacggctgcaggacttggcacatgatggtgccttcccgagagcttagtagggttttaaaggactgtgaagagatttttggtcgtcgctcaaagcgtaatttcacagggcctgaagctcccgcgctggggctagtagaactatctagttggaaggctccagaaaagtgtttttgtctccttttacatttttttttagagacagagtctcactctgtcacccaggctggagtgcagtggcacgatcatagttgactgcagtctccaactcccgggttcaagagatccttccacctcagcctcctgagaagctgggacgacaggtgtgcaccaccatgattggccaatttttttattttttatttttatttttttgagacagagtttcgctcttgttgcccaggctggagtgaaatggtgtgatctcggctcaccacaacctccacctcccaggttcaagcaattctcctgcctcagcctcctgagtagctgggattacaggcacccgccaccacgcccggctaatttcgtatttttagcagagacaaggtttctccatgttggtcaggctgctctcgaactcctgacctcaggtgatccaccccgctcggcctcccaaagtgctgggattacaggcgtgagccaccgcgcccaggccctaatttttaaattttttgtagagatgaggtctcaccatgttgcccaggctggtttcgaattcctgggctcaagcgatcctctcaccttaacctcccaaagaactgggattacaggcgtgagccaccgtgcctggctattttcctttctgtaaaaggactgtttccttgatactcacttggtcacctgggaaaaccacagcagtgtggttttggtctgacagcaatggaggctacgccgcgtgccccactgtggtgaggtcaagctcctggtgctaagatgctgatggtagcagtggcccatctagagtggctgctgccaagatgccggctgcagcggaggcatggctgggcctctcgatccacggatcaggcagcagctccgccttccctgcgtgccgcggcccgctgccctggggcagctctagacgcgggcgtctctgtgctcttggaggcctgggaaggccacccctgccccctgcaggcttagaagtgcctgctccaaatgcctggcctctcctcactccccacgcccgctccagtcgtggagcacagttggggctgagcccaggtgctgctgcagaccatccgggtgggtccacacttggggcagcacggacacaccagcccttgccacctcagccccctcgggactgggcgctgttgaacatgggagggaagctgagggagggctgagggtggctcagtgctggcctgcaggcgccccttggcatgaacaagctgggtgccatgaacagcagtgggaggcagacagacttctgggtggaagggggcaggtccctggtgaagccacaccttgaagcttcaagggggcctggggcccgggctgccagtcctgcagactggaaggaggactcggtgcttttgtcagaggggggatgtgcatgctggttggggtgggctgcctgtggaccaatcagcgtgcacttccccaccctgaagaccacaaaaaccccagactcagagcaacgcggacgtcgggatgaccagctgcggagagctaccctgtctgctgagagctgaacacttgtcaggacgacctgcctgcagagagaagccacccactgtgggtctcccctgagctgttctaacactcagtaaagctcctcctcgtctcgctcaccctccacttgtctgggtacctcattcttcctggatgcaggacaataattcagcagccacagaggtttccagccggaagagcaacatcccaaaggccccatcagtgccccgtcagcgcccatgccaagaagagagagacagacggtgcactcagcgtgcctgctgggctcggtggcaaacgtttggccagctcaggaaagcctcgtactgggtgggtcaggggactgcttggccgctctgtctgagcctcatcacggggcaggtggcgtctgcaaagcgggtgcttcgggcgttctcagtgctgctgtatcttttgtcctctgaatcactctcctctgacggggggagtttgctctggtgttgcttggtctaatctacctggtggcgtgatgggcagtctctgtggacagagtgtggagtttagcaggagacagaggaggatgcgggaagcctggactccatgtctctggggctctggtggcaccacagaaagagcctctggagtccaggaagggggcagggcccggaggaggaagcagagggcaggggacaggctggacacagcagctgtgggagggaggggtgctcgggatctcatggaaggcgctgcacaggtgtgctcagatcaggcaggtgtgccatgcacgtgctcatggctgcatcagtggaaagtggaggacagaggcccagagctgctgcaacgcccaggcctgcctgaagatgtgggcgaccagctgtccaagccaagtgggaggccaccggtggcaccgccactgcacacctcgctctgcccgacaggagaccaggaactcggcacactgcctcctgggatgcaggggggcttgtggccaagtccaagggttctagacccttcgagggggcagaagctgcttgagaaccgtggcctccgcagcctcgcatttttagaggagcctgtttctgggcactcactggctacatcgtgggcttctctggaaggagagctgcagaggccgtgtgctccacgacggtctccagggtgaggtctggtgcgagcctcggcgctgcttctcccctcggcctctcagcggcgcgcttccctttagaattctgattccctattcagccatacttgtcaaagcactcaacatccgatcacagccgagagtgaggccagggcttgtctcttgtaggtttagtgctttgagagatactgtcaagtaaatcctatacatgaaataaatcaagcaaatcccacaaaggctggtcatgtcttgttactaagcagtttgggttcctgtgattgtacgtgtcattgtacctggttttaggaaggcagtgctcctacccggcattctccagccccttaactcaaaccctctctttccatgttctcaatgacagacctggtgctcatccggaagcgctagaagtgaacacaggagatgtttcctaaagaagcagaacactggtgtctggggggtgatgggggcggggaaacatatttttccctttaaaaatatttattggccgggagcagcagctcatgcctgtaatcccagcactttgggaggccgagacaagtggatcacctgaagtcaggagttcaagaccagcctgactgatatgatgaaaccccatctctactaaaaatacaaaaattagctggacgtggcggtgtatgcctgtaattccagctactcaggaggctgaggcaggagaatcacttgaactcaggaggccgaggttgcagtgagccaagattgcaccactgcactccagcctgggcaacaagagcgaaattccatctcaaaaaaaaaaaatgtattgtggccaggcatggtggttcatgcctgtaatcccagcactttgggaggctgaagtgggaggatcacttgagtccaggaggttgaccagcctgggcaacacagcaatgccctgtcaattagccaggtgcggtggcaggtgtggtggcaggtgcggtggcaggtgtggtggcaggtgcggtggcaggtgcggtggcaggtgtggtggcaggtgcagtggtgtgcctatgagcccaggaggtagaggctgcagtcagctgtgattgtgctactgtactagagcctgggcgagggggagaccctgtctcaaaaaagattttttttaagtgtagttttttttttttttttttttttttgttgttgttcttgttgtttgttttgatacagagtctccctctgtcgcccaggctggagcacagtggcacaatctcagttcactgcaacctccgcctcccgggttcaagcaattctcctgcctcagcctccctactagctaggattccaggagcccgccaccacacccggctaatttttgaatttttagtagagatggggtttcatcatattggtcaggctggtcttgaattcctgacctcaagtgatccacccgcctcagcctcccaaagtgctgggatgacaggcgtcagccaccgcatccagcccttaattgtagctttttattttagaagaagtgttccagcatggtggcttatgcctgtaatgccagcactttgggaggctgagccgggcagattgtgtgaacttaggcgtttgagaccagcctgggaaacatagcgaaaccccgtctctacaaaaaaatacaaaaattatctggccctagtggcacatgcccgtagtcccggctactcaggggactgaggtgggaggatcacttgagcctgggctgtggaggctgcagtgagctgtgatcacgccactgcactccagccagggcgacagagagaaactctgtctcaaaaaaaaaaaagaagaagaaaggcattctcgggttttttttttgtttgtttgtttttaacttgaaaaaatagaaatgtggaaagaaggttccagcctacctgtaatctgcaccccagaggtggctgggacgggtgtgcagtcccgtgtccctgcacatgcgtggttcacatgcacatgtacacagctgagagcgggcatcccacgcagcgtcacgtctgtctttactgtactttcctagtgtgatactgggggacgcagtctcagtgtctgcagagccgctgccttagccccgttcccttggaaacagagctgagtcggagctctcaggcctgcaggcttggggaggaggtggggagggaaggaccagcccagacgggggcacacccagcggccacagccccgcggcaaacccaccggcctccaggtcacatgtaggccctgcagtgcctgtcggggagccccctgggccagggtgatgcgagcctgacccccacagaggccaaggcggctgaggacaggaggggcccgggtgcgggagggcgcaggcagggcccctgtgagcttgggcagacacagggagggggtcccatccgcctgccttgtaaacctggaagttgcactgatgagaaacccttttcttccctgaacgtgagacttccagcgtcctgttagctgcagcctcaggcctaagccgtctctaacccttccgcaggcatcgactacaagacgaccaccatcctgctggacgggcggcgggtgaagctgcagctctggtgagtctggaggaggtgcgagcgtcccgcacccccagggagtaacccccctggctggcatagcaccccctgtcagcacagtgccccggggagcacccatcccccaccaccatcggcacagcgcccccgggaacaccctcccaccaccaccgtcggcacagcaccccggggagcaccaccagccccaccaccatcagcacagcaccccggggagcaccctccccccaccaccatcggcccagcaccccagggagcaagctccccccaccaccatctgcccagcaccccagggagcacccttcccccaccaccgtcggcacagcgcccccggggaacaccctcccaccaccaccatcggcacagcaccccagggagcaccctccccccaccaacatcggcacagcaccccggggagcaccctccccccaccaccgtcggcacagcacccccgggaacacccttcccccaccaccgttggcacagcgcccccgggaacaccctcccaccaccaccgtcggcacagcgccccggggagcacccccagccccagctgcaccagggcttctctgaaggaggtggtggtccggttgtctgggcccccgtcatccagagtaggggaccccagaacggacatagcgctgtggctgggaatcggcttttgggatcagaacctgtggcctggtgtctgtgggaagatgccaagaggggaccgatgcagcgtggttgaggcagcccggggctcctgggtcccccacgcctggctcagtgatgccactgagcacccggcagggagctcggagcgtcctggtgccagcggggctgtggtcgggcctgcgggtggaggacccagacgtggggaggtgaggacttgctggccagcctggggctgctggctctgctctctcagctgtgagaaccccagctcctcaccttggggcaagcccggggcacctctccctcccccagcacccccaccttggggccagcttggaacacctctccctccacccgctcttggcttgggatggggggagctcctgcggttccagctctggggcggtggggatggggggctcctgcggtgcctcatcctggggctgcctccctcttgggcatccctcctgcactgctgccactcctgggtgaccctcgcctgagcctcctggcccttcctgcctgctgggccacccccgagccacgtgtgcctccagcagctgggacccccttctcttacctgtccccttcctacgcctgccccgtctagtagtggccagtcctggggagcctgtctccacagtgtccccaagcgccccgacccttcctgctgcacagcttcaggcctcccgcccagtctgctctcaggtccccactcccccggggccatgccctcgctgggctggcgttggggttgccgtcagcccctgtcctgctccccaccctccgccagctgggcctttgctgcctcctcctggccctgagccctgcaggtccaggaccttgttctcaagtctctccctccctccccgagaccactccttcctgaggggccaaggccacccaaaggccgcactcggccccacgcctgcccctgagctcagtgccttcctaaagatctgcttgcatcagggctggcgcgtgccctctcccagctccaccccgggtctggctgctcaccttagcgaacgcctccctgaccccagctgcccagtgggccgaacagtcaccctcacacttttctccctctcacctcaggagtgagatcccagggggcttctgccaagctcagaatccccccaggccccagcaggaccctgaggctgctctcctgtggtgccggtgccagctctgtccacactgtcgtctgagcaaggtcacactcccaccgtggaccccggagtgtggaccccagagtgtggtccttcctggtgcccacaactgggtcttctgcctgcccccacctgccctcacctccctccccacacccactggggctggggttgggctctgctctgctccttcagggtggcagcggcccaggaggccggcacgttgtcccagctgaggagggagtgctcccacttcacgatggggcactctgacagcacgtgctggcccttcggcctccctgcgaagctggcagattgacctggcccgctgcctcctcgaccatagcttttgggcagctcccgctgtgtgcaaagcctgagcacctgaggtcctgctgaggcttgaattctagatcaatttgcttctcaggaaatgaggcactcactcctaggctttggcaatggccagtgtcgctggtcccctctggagccccaggcccttctctctcgtgctgagggtggtcaccgaccacaggtgcatgtgacacaaacagcaaaaccatgccgcgtcccaccgctcatccgtgaggttgtgtctcgtgtgcggggccagcccctggcccactggggaatctcccattgatgtaggtgtgttcgttgcatgtgcagactccgggaaacagcgctggctgtcccagggccgcctcctctgggaactgatccctggggagcaccctttccaccctcatttgtttcttcctttttttttttttttttttttctgagacagagtctcactctgtctcccaggctggagtgcagtggcacgatatcagctcactgcaacctccgcctgccgggctcaaacaattctcctgcctcagccttccgagtagctgggactacaggagcacaccaccatgtccagctaatttttgtatttttagtagagacggggtttcactatgttggccaggctggtctccaactcctgacctcgggtgatccgcctgcctcggtctcccaaagcgctgggattatcggtgtgagccgccaagcccggcctttcatttgtttcttggagctccgttctggtctttgtgggtcccagtacctgctgcgtgtgccgtcatctgagaactcaagccctgcctgcagctcacgccaggcagttccctgtatccctcccctcttaggggcacactggaagggctgactccatgtgagctcttacagttgaactggaagagcagggatcccaccggcctctctcccctggtgtagacccacactccttactgcatagatttatcttcagattcaacaagttttttaaagcctacattgaatgtatttaaatatctgagaattatgttaaaaccgtcactattttttctagtttgactttttaaatgacagagaagagcatgagcctgggaggacatcccaacacccggatcccttcagggacattggaaagttttgttggggtctcacgctggcggcgtggtggctgctgactggcgggtgtgtggtgcacttgctgtggctctgaagttccagaacctgttgtcaggaagaagcactggtttcttcttaatggtctccaacatcttttccagggatacttcaggccagggaagattttgtaccatattccgctcctactcccggggcgcacaggtaacacagcatcccccgagctgggagatcaaaccaactttgaataataacatttacaatgcttaacttaccatcctttaatggatgattggaggacaaggcggttaagcttacgtataaattggtgctgagagtctaaaaacgtgctgtagagtggttggttgtttgaaagacttcatcagtattacggatgtaagcgtgcatttacgggactgtgtgtgcatgtacacgtgtgtgcaggtacgtgcactgtgtatgcgtgcatctgtgcatgagtgcctgtgtgtgtgtgtgtgtgtacatgtgtgtgcaggtacgtgcactgtgcatacgtctgcatgagtgcctgtgcgtgtgtgtgtgcacgtgtgtgcaggtatgtgcagtgtatgtgtgcatctgggcatgagtgcctgtgcgtgtgtgtgtgtacacgtgtgtgtaggtatgtgcactgtgtatgcatctgtgcatgagtgcctgcatgtgcgtgtatgtgtacacgtgtgcaggtacttgcactgtgtatgcgtgcatctgcatgagtgcctgtgcgtgtgtttacacgtgtgtgaaggtacatgccctgtgtatgcgtgcatctgtgcatgagtgcctgtgcgtgtgtgtgtgtacacgtgcgtgcaggtacgtgccctgtgtatgagtctgtgcatgagtgcctgcttgtgtgtgtaatgtgtacgtgtgtgcttgcctgtttatgtgcatgcatgtgcacacatgaactgcgtgtgtgcactgtgtgtgcatctgtgcatgagtgcctatgtgtatgtgtatgcaacatgtgtgcaggtatgcactgtgtgcgtctgtgcatgagtacacgtgtgtacacgtgtgcaggtatgtgcactgtgtctgtgcatgagtgcctgcgtgtgtgtatgcaacatgtgtgcaggtacgtgcactgtgtgtgcgtgcatctgtgcacaagtgcctgtgtgtgcgtgagctccatgtgtatgtgcacgtgtatgcgtgcaatccatccaggtgagtgggccacactcctcgagaggtggcgattactgcggtgcccctgcatcctgtgttcctggagtggctcgtgggtgtgagttctagtccccagatcaccgtgacatttgagggtttatcactgagcttatgaaatatcactgaaaatgatcataaaactgctacattcagttgataaatcaaaattatgtactttgtgttaaaataaggaaagtggttatttagttgtatgtctttgcgtgcatggccacagctgtgcctgcatctgtgttctgcgtgctgagcctgtgacctctcccccagggtgtgatcctggtctatgacattgcgaaccgctggtcttttgacggcattgatcgatggattaaggagatcgatgaggtatgttgtagaaatgccactgcccaagatccctgtaggcttgggaggacgtcaggccaggaattagggccgggccctccagggctcatgggtacccatggatcacaggccagggcaccggatggcgctccagcaggaaggagggtgcctcacctcggcacaacactggatagggctttggtgatagctacaatcacgaaagctcaggaagctggtccagacgaaacgagcgtccacggcgtacctcggctatgcgtggggtcaggtttggcctgcttcactccctgctgtggtcgggctgggctgaccagcagtgaccggcgcttgtgcctgctggcacgcagaccagcccgcctggcaatggtgacatggcgtggtcgacactaagcccactgtatgagtgtcccggggctgctagaaccgacgaccacaacctgggcgtcctgaacaacagaaatgcattctctcacggttctggaggccagagcccaaaaccaaggtgtcggcagggccacttccctacagccgcctctcccagctctcggcggtgccagcaaccctgggccctccctggcttgtggctgcaccgctccagcctctgccttcgcgtaacatggcctcctccgagtgtctgtgtcttctcttctcccaaggacaccagtcattagatgagggccctaattcagtgcggccgcaccgtaactatttacgtctgcaaagacggtctttccaaacgaggtcccatgctgaggttctgggtggacatgaactcgtggggggttcctcgacccagagcacccacattacgacgacaacaaaatctcactgaagtaacccatgctcctcgcctttctcctgcccgctagcatgcccccggagtccccaagatcctggtggggaaccgcctgcacctggcgttcaagcggcaggtgcccacggagcaggcccaggcctacgccgagcgcctgggcgtgaccttctttgaggtcagccctctgtgcaatttcaacatcacagagtcgttcacggagctggccaggatcgtgctgctgcggcatgggatggaccggctctggcggccgagcaagggtaggcccaggggctattccgggggccacctctgccctccagatgccgaggtgggtcagcggccccctggataagtgtctgcctcccgggacccgtctcaaggccactgtgtccgttctcagagcaaggcatttgagagaagtaatgactacagctttgtcagaaagctcatgagggagctcctgggatctgtacgtgggcagaggggacgtcgcggcagggcttgctgcatgtacaagccagggccacgggcgtccgagccttgggagggcgggagaacaggtgtgggcaccacccctcattcccagcccaggtggggacatccactaagcaaggtttatcttttctctcccaagtgctgagcttgcaagacctctgctgccgggcggtcgtgtcctgcacgccggtgcacctggtggacaagctcccgctccccattgccttaagaagccacctcaagtccttctcgatggccaacggcctgaatgccaggatgatgcacggcggttcctactccctcaccaccagctccacccacaaaaggagcagcctccgcaaagtgaagctcgtccgccccccccagagcccccccaaaaactgcaccagaaacagctgcaaaatttcttaaggaaggcactgaaagaaacacggcggaatctctccaggagaagctcggcgttacccccggcagctggtggatgcatctcagatcccggttcctctcggcgaatgctgcttgcgaatgtgtgcgacgccttccgtgtgatggaaacacactaccccgtcggacttcgaatttctacgtggatgtgcatgaagctcttgttttcgatgtgtgtttgtaaagggaaaattagtactctgctcgactcttggtaacatgaaattctgaatgttactttatcatgattgcactgcaactttttccttaaaataactgcttttgtaagaacggtgatattggagtgattagtataaattcaatggaatttgagaagcaatggcagcgggataatttagagtcactgatattacgagaggggtctttttgtaaacctccttttcaatgtcaaagcgccaatttataaaacgctgcagatgtagaggttatgtgcaactgatctgtccagtttgtgtatgaaatggatttgataaagtttttgctagttatttactacattttgggattaataagtgatttatatgcatatttttctgtaaatctacagttttttgtacaagatattctacaagttatgaagctaagggaagaaaatgccaaagatacctctagttatgttgaacacagccagcacagtttcgacatgtcaaggaagagctgtttcagtaaagaatgaagtgaaaacacttatttaggaaaatgtttctcaacaataaaatgtatagttgtttctctcttggtagagttggcgaccggttctttcgaattttgtatttatttatttatttatttttgagacagagtttcgctcttgttgcccagggtggagtacaatggcacgatctgggctcaccacaacctccgcctcccgggttcaagcgattctcctgcctcagcctcccgagtagctgggattacagaggtgcaccaccacgcccggctaatttttgtatttttagtagagatggggtttcaccatgttggtcaggctggtgttgaactcctaacctcaggtgatccacccaccttggcctcccaaagtgctgggattacaggcgtgagccactgcgcccggccagattttgtgtatttcttatagccctttacttcactgcgccactgcctggtgtagacatcacatatcggagctaatacacgacactggcaacaaggctgaatccttgaactgttgtcgcctgttgagaaaggattccttttccggaacagaagtgcagaggaggagagagcggagagttaaaagctggcacccaggcatgtgcctgtctgagaaatcagagccgtgctcctgagcctcggtgaggagctccgaggggctgtcaggaattccgcatgaagatgtagcccctgaccccgactgcctcagagcagggctgaccgcaaagacctccagggccgctctcttccctggtcacactgttgaacgtttctctgtggctgggggtcgcaaatgagggactaaaccaaaaaaacgaagcgagaaaatacccagatgttcctagttcctgctgatgatctgtagattcttagaaacttaagggacccagctgggtgtgatggctcacacctgtaatcccagcacttcaggaggccgaggcagccggatcagaggtcaggagttcaagaccagtctggccaacgtgatgaaaccccgtctctaataaaattacaaaaattggcttggcatggcagcgcacacctgtaatcccagctactcaggaggctgaagcaggagaatcacttgaacctgggaggcaggggttgcagtgagccgagatcgtaccactgcaccccagcctgggcgacaagtgaaactccatctaaaaaaaaaaaaaaaaaagaaatttaagggaccctagaatcaggggcaaagcctgtattcagagatggtggaaccgaggcccagacaggagagaggagcactggtccctgcgggtggacccaggcttgggggtgtctggccacctgggcacggcagccacggggacaaagtccacggggaggcaggggtgtggtctgtgggcagaaggtgaaccctgaggggacagtgtctggagagggtggccagcctcgtgcaggcacgctgcaaagacctgtgcacccttctctctgctgtgccacaggtggggtgagaacgacagggccgacctcccagctgcaaacacaaggacactgagatgcacagaaaggagagtccacgttgaagaaacccacgttgaggggcctcttctccctccgttcccagctcgctgatggtgaagggtaaggaaatggatcctcccattgcaacattaaaccaggccaaacctgtatttttctcttccttcctttttcttgttttgtaattgatgtctcctcgggactactgataatgtcctagaaagaataaaataaagtttcccaaggctttgtgactcagagctctttggaggtgttcaccgaatgcacgggccgcccggaggccttggccctccagggaaacaccaccagaagtccccagaagcggaacatgtagcaaggaggctccccgagatctcccagagggagcacagccctgccaagttattggttttggacttccggcttccagagctacgagaaaataaatatttgttatttaagtcaccaggtttgtggcgattgttacggcagcctcaggaaactcctacaaggaagtgagttacgctcacggcagaaagtgctacagcaaaccaaggcagaacaaaaacagacgaaacctaatacagaccggactaagtagaagactgtgtgtttgggtggtgaatatacaaaaaacataaatataaattaaacctta

SEQ ID NO: 5 - DNA, 119449 bp, Homo sapiens
  source 1..119449: mol_type = other DNA
gcgcgtgcgcgcgcccggccggccgtcgccgcggtgaccgtcctcggagtccgtcggctcgcgccccgcccccgtcgccccctcccctgtcgcgcgctggggctgtttctcgctccttccgagttaccgccgccgtcgccgccgctcctcctctcccggtcctgggtttccttggcgctgcggccgccgctccctctgcgacctgtatgaggaggaggaggaggaggatgtgaagatggcggagctgcagatgctgctggaagaggaaatcccggggggccgccgggccctcttcgacagctacacaaatctggaacgggtggccgattactgcgagaacaactacatacaggtgcgaagcatccccagctgggccgcgtcggggacccccccgccgggggccgcgcgcctcggggcgtggggccgaggccgcctcggggacacggcccagcggagcccccgatgggggtggggagctgggtgagggctggggctggtgaatgggtgggaattctccggctggagaaactgcattttaaaaacctttaaaaaagcggtgaagcagttctcggcgtggtgcgtgtgtcgcgtcccgcctcctcgccgctcccgccctcggccgcccccgcactccgcgccggtcagcgttccggatggcggagggggcggagagtggcattttctgtttgacggaatcctgctccccaccttagggtaggggtgtcgcgggtgttgacgggttacctccatcccccaaattctggatgatttttaaggggttatcttgctgcagagtgaagtgcttcaggcttcagttttctgttcctgtgaatgcttcagaaaccctttcttaatattttatgttctaaaggggatacggtagaagagcagcagtttcttgttggaagttaatgccatttttttccctatggagaaggatgatgagctgattcccccctccctcctagttctgttagaataggcagttttcctgggggtgggaggaggacagactatgactgtttcttagagagaattgggaagatgaacctcctggtttaattttttttttttttttttttttttaccgtgatggatcgtttggctcaagggctgatagtggtaggggcgtgtgtatggaggcgggggataccggatggtatgagatccagctgctcctggatgaagcaaaatattctgtggattaaaaaaatccttctttaaaaattacttgaaaggatagcaggttaaaaggcacagtttgcaaaatctaaaatcttttgcttttttttttatggttattttgaattatgggttctgcctccattttttttctttcccgtttaaattctcttgggataaagatggaaatggaagcaatatgttaaactgtttcttcacagtctttttttttttccttttttcttgctcccacctccatctctccagggatccttcttttttcttttctttttgagacacaacctcgttctgtagtccaggttggagtgcagtggcgcgatctcggctcactgaaacctcggcctcctaggtttgagcaattctcatgcttcagcttcccgagtagctgggactacaggcgcccgccaccacagccggctaatttttgtatttttagtaaagatggggtttcaccatgttgaccagactggtctcgaactcctgacttcaagtcatccacccacctcggcctcccaaagtgctgggattataggcgtgaggcacctttcttaacattagctatataggaaagcattttcatgtcttagtgtaaattttaaaaaacaggtgttacaattttataggttcataaattttgtaatggccacattgttgatcgcggaagtgagattttgtttgattagacatactgttatcttgtagacaacatttgtatttgagaatgacccgaaccactgtataaacctgttccttcgaaagaggcagttgactatggctactaggaaaggaatgtaggcaagattaatacaaaaaaatacaaatgtccacttgtaatgtactttgctgatacaagtggggtagaaaagattcagaggttcaggcctgggcgataagagtgagactacatatcaaaaaaaaaaaaaaaaaaagattcacttgctcaatttttcgctaaaattgaaagtcttttatggcctagaactgtgtgaggggtggatggtacatacctagtaggagaggctgatcttggaggaaattaataccatgtagttaatttatactctgtagtgcactgctggtaccaaggaggactggaggaagcaatgctgttctgagggatttcacaatctctagtagaggcaaaacctaaaggaatgaagtggtaattccattgccttgtgcagcatattatggggaaagagttgcaggtcagaagagaaactgagggtggaaaagtggattgcaattattaccagtaagaaataaaaaataaacagatttctctctcttttgcaagatgatttcttattgtaatttgaaggtacaagttcctcttaagttataattgctatataaaggtaaaaggataaggattattaaagctgaaaggttaaaggcatcagcagttttctttttaaatattttatacatttccttcagttgaaaagagaaaaacgttactactatcaatctctgttttagcaatgggactcaaaatttagtgtggtgacattttaaaatttaaagcataaatattgattaatattaatttaatagaaatgaacttagattttaaaatagtttatttcttcagtttagcatctgaagtatattttacactttctcttttttgattatcatttattttaggatgccttaggtatataattggtacactctcaggatgatagctcttatatgatttgttgatttgttgggaaagttgataaatagaacgtggtgacagtggatttgtgctgatccagctgtacatttggttgaccagcaggggttttgatgctgcctggaccctgcagtagatgaaagttaattcacaggatcagtgatcaaatggtcaatttagccttttttttttttttttttttctgagacagagtctcactctgtcgcccaggctagagtgtagtggcgcgatctcgatctctgctcactgcaacctccgcctcctgggttcaagcgattcttctgcctcagccttccaagtagctgggactacaggtgtgtaccaccatgcctggctaatttttgtatttttagtagagacgggatttccccattttggccaggctggtctggaactcctggcctcagatgatcgacctgccttggcctccccaaagtgttgggattacaggcgtgagccaccgcacctggccaatttagccttattatagcatcatgtcttagccactagctcgagttaactaacccaacactcattttattgtgtggaaatgtaatttttgcctataaagtagaaaaaaatctgtttatcatgtgtaataagtgtttttgctcagtgttctttttttttttttttttttgacacagagtttcactctgtcgcccaggctggagtgcagtggcgcgatctcagctcactgcaaccttcgtcccccgggttcaagtgattgtcctgcctcagcctcccgagtagctgggattacaggcacgtgccaacacgcccagctaatttttgtatttttggtagagatggggttttgccatgttggccaggctagtctcaaactcctgaccccagatgacccacccacctcggcctcccaaagtgctaggattacaggcgtgagccaccgtgcctggccccctaagagtcatttttaataaaaatttagatagtttcattattctaacctctagaaaatgggatagtcaatattttttctaaaatatgataaacaggtataactacagtttgctgatatttatcagatcaattttatttcttgcctatacaaaggatttagtagttggtagagacttttttttgagatacatgtaagacctgcgtttttcttcatttattaatatacacacctaggccgggcacggtggcccacgcctgtaatcccagcactttgggaggccgaggcaggcacatcacgagatcaggagatccagaccatcctggccaacatggtgaaaccgcgtatctactaaaaatacaaaaattagctggctatggtggcgtgtgcctgtagtcccagctacttgggaggctgagatgggagaatcacttgaacctgggaagcggaggttgcagtgagccaagatcatgccattgcactccagcctgggcgacagagcaagactctgtctcaaaaaaacaaaaattacacatataatgcctaatatgtttgaaggtgtccaggaattaaaaatgttttggttaacttggaatctacgtttttacaaatagaagaatttttattacaatatagttgtcttaatgttttggtagatgaaataactccctatttgttacttccctgaaatctgaaaagccaacttgttgatatgtacgtttttctttttgttagataaaagttactgatttttgtgagtgacagttcacatagatgcatagtaaaatcttattgtttggattaagagtagaatcatcccataatatggatttattcaaaagagaagaaattaagaacttaccttaaatttttacctgaaatatttttgaacaataggagacatattagtagctttccttttcttctcttaatcaatgtggatactcccagagttcactaaaaacttcatgagaggtttacaagggaatattatcagtcagtttcatcaaaagtaattaccaaaatgatacaaagatttaaaatttttatttaataaaaatcattagaatacatgctcattgttgaaaaattattggagaatacaagtaggtattatgaaagaaatggaaaattgcccgatcatcttgaatatatatctggtactcatacttttaaatattttttgtatgcacaactatatatcaatatttttgtagaaatgggtttatgttctatattctgtacctttaaaagaaccttttaaggatgctgggcttgacttttttttaaatggatgtcatatactatattgggaggaggttggttatatttataggtcgagttctgtatgttcttgcaaatgggagaatcttagaatacctagaatgaaggagaaagaggtcagttgagagtaaggagactgagtagaatttgggagactgaattccccatagattaagatgactcaactcatttgaaattgatcaaggcttaccattcctcaagaaattagtccctaactctcagcagagacatttggtgaatagattttcagtgacaaatcagtcatcttcaagacctttgacaagattgcaaaaacaggctaatttatatttgagccccttgctcttttaaacattttgtcatttgtacacttcctacaccttcttgtccaaggaacttaagtgacctcataatttccgttattgatccaggaaatccagtctcacctcatttcacccttccttgaagagcttcctggttcaaaattgctctttaccaaaataattaattaataaactgttcatttattttttcttttcttttttctttctttttttttttttttgagatggagtctcactcctttgcccaggttagagtgcagtggcgtgatcttcgctcactacaacctccggctcctgggttcaagcaattctcctgcttcagcctcctgagtagttgggactacaggcatgtgtcagcatacccagctaatttttgtatttttagtaaagacagggtttctccatgttggccaggctggtctcgaattcctgacctcaagtgatccacccgccttggccttccacagtgctgggattacaggtgtgagccatcgtgcccagcctcatttactttttcttcttaccttggtatgggtaatgtgagaatgtatgataggtttactttatttagagtcatcttttctcacccagagaataatatataaaccaaattggtttacttatgtgtaaaatatgtagtagagatatttttgagcatgaggtgcttttggtgttactttttcttttaaaatgcagggaatttaatagtatgcagtttcagggtgtgtaaggtaatcttttggtggatgaaatatatttggtggatgaatatgctgtgatttgcttacacccaccccaaatccattttgcagcaccctactcactgtccagagattctgggaaaaaaacaatagagaagacaaagccagtctagacaccatttgactctaccttgtgaatattctgaaagttacattaggctagttgtagattttttttttttttgagacagagtctctgtcgcccaggctggagtacagtggtgcgatctcagcttactgcaacctctgcctcctgggttcaagcaattctcctgtctcagcttcctgagtagctgggattacaggtgcacgccaccacgcctggctaatttttgtatttttagtagagacggggtttcaccgtattggccaggctggtctcgagatcctgaccttaggtgatccgcccgcctcggcctcccaaagtgctgggattacagcgtaagccaccgtgcctggcctagttgtagacttttgatagcttatggttgaatttttatgggattggttaatagattggattcatgaggtagcatgtagggcaacacattctattttggatttttcatttactttgtgtttccttccagatacgaagctcctagaagatggagtcatttcttaaaaatttctatattttcccattagccgtaggatgttctccatatactagccactcattaaatagttgctgaatgtaagaaatacagacttgaatatgcaagagcctatgcactgaattatttttattttattactttattttattttattttttgagacagggtctcactctgtcactcaggctggagtgtagtagcacgattatgggtcactgcagcttgcactcccaagctcaaacagtcttcacacttcagctcccaaagtagctgggactacaggcttgtgccaccatgcccagctaattttttttgttgttgttgttagaaatgggatctcactatgttgctccggctggtcttggaacacctgggctcaagcaattctcctgccttggcttcccaaagtgctgggattacacctgtcagccgccatgcctggccttgaattattttataagtaggatataattacatgtaaatttaccttgcaagttttttcctatttgattttttggtgacatttatgttctgtaaagttttgcagtacttttcatatttgcataattcatgcaaggaacatagttttgcttttttcttcttaagtaatatactttgtagaaaatttggatgaggtaacagctttgttttgaatcatttacaacatgaattttttctcatttgatttttaaagtcaggtttattgagttttaatacatatatggtacaagtcaccctttttaggtgtaaaggtttatgaattacaataaacttacatagtcatgtaaccaccacaatgtaaaattttccttgtaccctctgtagtcagtcctgtccctccactactagcctttggtaaacactgatatattttctgtccctctagtttttgccttttccagaatgccatataaggggcattatgtagtatatagccttttgtgtttgacttcttggtactagaagtcctaatacatttgaaaatcatcagtgttattgtgttttgtcagtactttgttccttcttattactgagtaatattctagagtatgaaagaatcataatttgttcatccattcaccaactgatggatttctggattgtttctagttttaggcagtggtgaatatggctgtaaacatttgtatacaggtgttggtgcaacctaagtcttcactcttttgggtaaatttaagggaaaagatcaactgttgtaccctggtaacagtggatgtatccacataggctgcataggccagtgcttgaactgcatctgatctgaatcttggccgagcactttgtgatcctcttggaatataagattatggaagtttgcgaggaccttatgtgaagccctttctcaatctcttcatctgccgaggaggctgtacgtgataacagtgcctcatcacctcctagttcccatgagatgaggctctctattgtacccttttaggtagtagctgcaggctgtaagactttagttgcagcatggcattggctcctccgcaacagagtgtcatatctatgttgtagtcacctggctccttttgttttagtattgctttacacaagggctgtatcttttactactattccttctgccctccatgtaaatggtaggctttctgaacctaacaagcagttgggcaggtctatcacattgccttctctttgccttgacaataaatatctaatagtgggattattaccgtatggtaaatgtgtgtttagttttatacaaattgccaaactcttttccaaaaacgatggtaccgttttgcgttcccaccagcaaagatccagttgttcttcatctttgtcagcatttggttttgtcaggttttaaaattttagctattctcttgttagtgatgtctcaaaggccatatatgacaagcctacaactaacatcatactcaaccatgaaaagttgaaaccttttcctctaagatcaggaataagacagtggtgcccagtgtcactagttctatttaatcaagtactgcaaagtactagaagtcctagccagccagttaggaaagaaaaataaacaaaaggcatcaaaattggaagaagttaaattgtctctgtttgcaaatgacatgattccttatgtatacaaaaccctaaagactccaccaaaagactgttagaattaattaacgaatttagtaaagttgtaggagacaagatcaacatacaaaaatctgttgtgtttctacatattaactacaaacgatctgaaaaattaagaaaacatttccatttataacagcagaaagaatagaatacttaggaataaatgtaatcaaggaggtgaaaggtctgtacactaaaaactataagacatttatgaaagtaattgaagaacatgcaaataaatgggaagatatcccgtgctcatgaattggtagatttgatattgttaacatgtccatactacacaaagccatctacagatttaatgcaatctctatcaatattccaatggtatttttcacaaaaatagaaaaaccctaaaattcataggaaaccacaaaatactttgaatagccaaagcagttttgaataagaacaaagttggaggtatcatacttcctgatttcaaactatattacaaagctataggcctggcatggtggttcatgcttgttatcccagcagtttgggaggcctaggtagccagatcacctgaggtcaggagttcaagaccagcctggccagcgtggagaaacctcatctctactaaaaatacaaaaattatagggcatgctggcacacgcctgtagtcccagctactcaggaggctgagttgggagaatcgcttgaacccaggaagtggaggttgcagtgagctgagatcatgccactgcactccatcctgggcaacagagcgagactctgtctcaaaaaaagctatagtaatcaaaacagtgtgttactggcataaaagacatgtagactaatggaacagaatggagcccggaaatgtagccacatctgtgcagtcaactaagctttgataaaggcaccaggtacacaatggggaaaggataattcagtaaatggtattgggaaaactatatccacatgcaaaagaatgaaatttgattgttatatcacacatacaaattagctagaaatggattaaagacttaaatgtaagatctgaaattataaaactctttggtatgggtcagatgtttgttcccttcaaatctcttgttgaaatgtgattcccagtgttggaggtgggtcttggtgggagataattggattatgggggcagatccctcatgaatgatgtagcaccatccctttagtgataagtgagttcttgcttggttcacgtgagaactggttgtttaaaattagtctgggagcccccccaccatgtgacatgctggctccacttctgccatgattacacctcaccagaagtacgtgccagcactgtgctttgtgtaaagcctgcagaaccaagagccgattaaacctcttttctttataaattacccagcctcaggtattccttcatacgatcataagaatggactgatacactcctagaagaaaacataggggaaaaagctccttgattctggtcttgacaatggtttttataaatatgacaccaaaagcacaggcaacaaaagcaagaaaagatgagagtgactacatcaaactaaaaggcttctgcacagcaaaggacacaaaatgaaaaggcaatttatggaatgggagaaaatgtgcaaaccatacatctatctgataaggggtttatatctgtgtgtgtgtgtgtgtgtgtatatgtatatatatatatatatatatatatataaatatatatatatatatataaatatatatatatatatatatatataaaggattcatacaacttaatagcaaaaaaccaaataaccagattttaaaaagacctaagtagacattttttcaaagaagacacacaggcgtccaacaggtatgtgaaaatgtgctcaacatcactaatcattagggaaatgcaagtcaaaacaaaaaggagctgtcacctcacacttgttagggtggctatcaaaagagagataagtgttggcaagcaggtggagaaaagagaatccttgtgtgcagtgagaatgtaaattggaacagccattatgaaaaactggttccggccgggtgtggtggctcatgcctgtaatcccagcactttgggaggccgaggcaggcagattacctgaggtcaggagttgaagaccagcctggccaatatggtgaaaccctgtttctcctaaaaataaaaaaattagctgggtgtggttggcgggtgtctgcagtcctagctactccagaggctgaagcaggagaattgcttgaacccgggaggcagaggttgcagtgagccgagattgcgccactgcactccagcctgggcaacagagcaagactccgtctcaaaaaaaaaaaaaaaaagaaaaagaaaaaaagaaaacccagttctccctaaaattaaaaataggacaaacatacaatcccacttctgggtatatatccctagggaatgaaatcattatctcaaagagacatctgcacacccatgttcatttcagcattattcatggtaactaagatatggaaacaacctaagtgtcagtggatgaatggatgaagaaaatgtgtactgcatgcacagttctccttcagtctacatggggcattggttctaggacccccaagtatacccaaatctgcatatactcaaatcctgcagtcacccttgtggaacgcgtgtatatgaaaagtcatctgtcccatctgtatatgtggatgaatactgtatttgtttgaaaataatctgtatattggacccacacagttaaagggtcaactgcatatgtaatagaatattattcagccataaaaagaaggaaaccctgctatttgtgacaacatggatgaacctggagaacattaggtaagtgaaataagccaggcacagaaagacaaataccgtatgatttcacttatatgaggaatctaaaaagatgaacccatagaatgaagcagataatagaatctgcttctattatcggccaagggccgttgggaggtggggagaaatggggagatgttagtcacagggcacaaacttgtagttataggatgaatgtgttttgggggtctaatgtactgtgtagtaactatagttaataatattgtatacttgaaatttactaagtcagtagatttttttttttttgagacagcgtcttgttctgttacccaggctggagtacagtggcatgatcacggctcactgcagcctcacctccccaggctcaagtgatgctcccaccttagccttccgaatagctgggactacatgtgtgtaccaccacacatggctaatttttgtagtgacggggtttcgccctgttgcccaggctggtctcgaactcctgggctctacccatccacccaccttggcctcccaaagtgctgggattacaggtgtgagctaccatttgcctggctgagagtagattttaagtgttgcccactccccgctcccaccaaagataatcaagaaatgattatcttgattgtgataaccattttacagtttatgtgtgtatcatgtcatcatgttgtacactttaaatatatacagtttttgtcagttatacctcagcaaagctgaaaaaaaaaacccaaagcaaactgaaccaaaacaatattgcctgcaagccacaaacaatcagcatctagccttgacatcatctcctgttacactcctttacccttctttgttcactcaacttcagccactttggcatccttttcttgaacataccaggcatacttctgcctcagggcctttttgctttgtatttgttatgccctctgccaggagtactctactccaagatagttgcatgattggttcttttacttccttcaagcttttgctgatacatcacgttcttgatgaccccttcctggctactctgtgtaaaattataacatactcctgccccttgctcactctccctttgcttatacttatccttccatgctttttttacgcctacatattttctcttaacatacagtgtttcttatttatttgtgtgttttccctccctggtatgtgagggcagagatttttgtctcttactcatttccagtacctggaacagtgcctggcacaaaataggcactccgtaaatattcgctaaatgagcgaattagatcttttctagtaagcattagaaaatgtcggagggcagtgaaataaattagttttgggccaggctcagtggctcactcctataatcctagcactttgggaggctgaggcaggcagacttcctgagctcaggagtttgagaccaccttggccaagatggcgaaaccccatctctactaaaaacaaaaaaatttctccgggcttgttggtgtgcaccagtagtgcctcgggaggctgaggcacgagagttgcttgaacccgggtggcagaggttacagtgagcctagattgcaccactgcactccagcctgggcaacagagcgagactccatctcaaaaaaaaacaaaagaaattagttttgcaaatttgaagagttgatagatttatgctctggaaaatgaaagttggcaaatactttttatttgtccagaatatttaatgtagatatggccaacagaattgacactaatattccacatgtggttggtgctttagggttaagcagtttatttacagttacttagtgcaggacttactcaatagtggaagctcatcaaatgtctgaactgatctacagcttcctgggaggtataagcaagggagatattcctattataacatattagatgagacaactcaagtttacctctgactctgctaaactaaaattctgtgaagagaggaattatgttcattttttttttgcctgttatgtcctcatttcttagtgttcagtaaatttttgttgagtaaaatgaacttatgactcacaccatttattttattatatgtttttttccttcctggtcgttcaaaaatagttattgagcatctttccattctgtgaggtcagtggtaagtaactcatggaccaagtccagttctgttaccattttgatttctatgaagaatcttcgttgtaaattttgaattaatggagttgaactgcatataatatgggactgtttttttgtttttcttgatgttatgtggccttacccacttatgtgttgaaggcttttcataaaggcaaggagataggttgttaggaacctacgaaacaaagttgaataggggaagccaacaagggatgccagcatctttcaatatgtagtaccacaagttttctgccagcagatagtgcttaaatagtgattccatgtctccctcaaaaccttttatttatttatttatttatttatttatttatttatttatttttgagacaaggtctcactctgtcatccaggctggagtgcagtggcgtgatctcagctcactgcagcctctgcctcctggtctcaggcactccttctgcctcagcctccttagtactactgctgggattacaggtgctcgccaccatgcctggctaatcgccctcaaaaccttttattctgaatctagaagagcaggctaggttgacaaaaatatttaaattgcctggcttgatataatgtctatacacacacacatctcattgtttttgagagaaaaggaagtttaaatttatggacatgaaatttatattatttctagttttttaatcattcatgcatttgtttataatgcattaacatgcataattatgaattttattcatgtgtaaataatacagtctataccgttaacaaaagaccatgagatctgtggaagaagaaaaaggagaactttatttcctatagaggattacagcctgcagattgggaagtggagcctccagccaaaactaaaagcaagcacctggggaggctgaggcaggtggatcacgtgaggtcaggagtttgagaccagcctggccaacatggtgaaaccttgtctctactaaaaatacaaaaattagcgggatgtggtggcacgcatctgtagtcccagctactcgggaggttgaagcaggagaatcgcatgaactcgggaagcggaggttgcagttagctgagattgcggcactgcactctagcctggacgacagcgagactatgtctcaaaaaacataaaaaaatttaatgttagcaggttagtttgtggtacaaacatgttatgtgcatgtaatgacaaggcattatattccaggtttttttttccttcttttgaaatgagtgattaaagatagaatttctaggactatttatttatttttgaaatagagatggggttgctcagggtgatctccaactcctgacctcaaagacatcctcctgcttgggcctcccaaagtgttgagattacaagtgtgagccactatgcccagcacttcagagttattaatgaggtttaaaaacatgtttttagaagtagatttaaagctctctgattgagattggtttaatactatttgatgttatttgcatataggctcttctgacaaaaatatgttaattaaatcatgtcctctttggccactaatcaggtcccctttctccctttccaaaagtaacagtttttgtccaagttagttaaaacactattttttggtgtatgtggtggctcacacctctaatctcagcactttgggaggctgaggtgggaggattgcttgagcccaggagtttgagactagccttggcaaaaagacgagagagaccccgtctctacaaaaattacagaaattagctggatatagaggtgtgtgatggtgtcccagctagttgggaggctgaggtgggaggattgcttgagctcagggttggaggctgcagtgacccttgatagtgcttgaaatgtcaaatgttactattcatttatatatttccatttggttcttactccatagtaaagcttagcgcttcaactgtttagagacagtcttattgagcagcataagttgtaccatcttacaattataagaaaagactataggccattaataatattcatagaaaggaaacaatctttaataataaaaccccaacaatgccagtaattgctttaaagtactaatgatgtatttcctgatgaaaaaatcaagaacaatataatttttaaatttttttttcctttttttttgagacagggtctcttgctctattgcccaggttggagtgcaggggcgtgatcatgtctcactgcagtctctgcctcctgggttcaagcgattcttctgccttagcctcctgagtagctgtgattacaggcaactgccgccacacccggctaatttttgctttgttgttgttgttgttgttgtttttgttttttttttttgagtcggaggtttgctcttattgcccaggctgtagtacaatggcatgatctttagaggtgaagccagctgggcttctgggtccggtggggacttggagaatttttctgtcttgctaaaggattgtaaacacaccaaacagtgctctgtgtctagctaaaggtttgtaagcgcaccaatcagcactctgtaaaaacggaccaatcaggactctgtgtctagctaaaggtttgcaagcgcaccaatctgcactttgtaaaaacgcaccagtcagcgctctgtgtcttgctaaaggtttgtaaatgcaccaataagcactctgtaaaaacgaaccaatcagcgctctgtaaaatggaccaaccagtgctctgtaaaatggaccaaccagtgctctgtaaaatggaccaatcagtaggacgtgggcatcacaaaataagggaataaaagctggctgccggagcccgcagtggcaacccgccggggtcctcttccatgctgtggaagctttcttcttaggctcttccccagtaaatcttgctgctgctcactctttgggtccgcactacctttatgagttgtaacactcacattgaaggtctgcagcttcactcctgaagccagcgagaccacaaacttatcgggaggaacaaataactccagacacgccattttgagagctgtaacgctcactgcgaaggtctgtggcttcaccctgaagtcaagcgaaaccaggaacccactggaaggaagaaactccggacagatctgaacatctgaaggaacaaactccggacacaccatctttaagaactgtaacattcacggcgagggtccacgggttcattcttgaagtcagccagaccaagaacccaccggaaggaaccaattccggacacaatcttagctcactgcaatctccacctcctgggttcaagcgattctcctgcctcagcctcctgagtagctgggacaacaggtgcccgccaccatgccagctaatttggtatttttagtagagatggggtttcaccgtcttggccagtctggtctcgaactcctgacttcaggtgatccacccacctcggcctcccagagagctgggattacaggcctgagccaccacgcccagccctaatttttgtatttttagtagagacggggtttcaccacattggccaggctggtttcaaactcctgacctcaagtgatccactggcctcggcctcccagagtgctggggttacaggcgtgaggcactgtgcccagcaatattttcttttttaatcagatgagttttgcttttgacaaaaatttgcttctggccgggcacggtggctcacgcctgtaatcccagcactttaggaggccgaggcgggcaaatcacctgagatcaggagtttaagactagccaggacaacatggtgaaaccctgtctctactaaaaatacacacgcgcacacacacacacaaactgaggcaggagaatcgcttgaactggggaggtggtggttgcagtgaatggagatcatgccattcactccagtctgggtgacaagagtgaaactccatctcaaaaaaaaaaaaattgcttgtaattctatgttgattccaaataagatttcagaatagtaagctatttcccaactatttaaatctttgaggagtttattgttgcagatgtgcaaaccagatagatctaccggatgctactttggtatttggtatctttttcaggtttttgctaacaaccacaaaagactatgtttgtttgtttgtttgtatattagaggaaaatatttctgcagcttgggaatatatgggactaataggcatgtgtatcaccagtgtgtatgataccatattactgcctgaatgaacacatcagctgtaagaaggaaggtgagaatttgagaaatactggtctgtgttttgggtttatccattactggagttgcacgttttcccttgtcataattcctgtagcttttagctcttcctcattgtctgttgagttgaattaactctttctcccccaccacatttaactctagggagtgtaaacttgtgctgttctctttctcattccatgtttctgttgtcttttagttaacatcttgtctttgaggggaatgaattaacttctttaagggaagtgaattaactactttgagagaaataggagaaagagcagggacaaaataataacctgtggccaaaaggaggggatgtgatgtatgatgaaatgtcattcctttatcttatcttatattcttgcagtgctagctgttaaaatggatccagtagaccttaaacctaggcccttgtttgtgctgcccgacttcatgtgctatagtgcattttaaaatttattcagccattcatttcttatcttataaacttgaatttgttttaattttgtatagtttttcttatttaggaaggactttgtgttcttacatgagtttcatataatagagtttgaaactaagctattaaattatgatgattgccctaacatgtgcatcaggtacttttttgttttgtagttggttttattggagccattgcatgtcctaacagggtaaggagtgatcatatagaaagcaaggaagtgatgggtttggtctctggtcaaaccatagaagtgagttgagtaattcatttttgctctatttttccatctgaaaatgggaaggatgatatcctgactcccagtttatgcaagttttgttcatagataaaggtgcactggttttcactcatcttttgtgtgaaatttctggtggcataggaatttagaaagaaatcaataaacttgtgattcttgttctgaagatacttctagccttgtaatcccataatggacataagaccattacacgaagaaccgtagcatgtagtaaatggcatgatgacattaccacccaaggaaaatgtgcagtggaaactcatggttcaatttgacaaggcgtttatcaatctccaccatgtgccaagcctttctgggcagctgagagaagagataacaaaatagtttctgttttagagaacagggaatagaaatgatataaggattgagatgatatttttataatactttaggtttattctgcacaggcaaactgtgtattatacgacacataacttatgacacttaggtttctaactgggaaattgtaggtgcttgtttagttattgggtgttgttaatggctttttggtttggcagtttgtctaaggcctagcagttgtttgaggaacatttacatataggattaaccttttgtaatgttttcagaatcctgcagtttcgatgctttctagatatttaggatttgatcattaaccaggtgataatataagcatgaaaaaaatgatttgggctgggcgcaggtggctcatgcctataatcccagcactttgggagggtgaggtgggtggatcacttgaggtcaggagttcgagaccatcttggccaacgtggtgaaccctcgtgtctcctaaaaatacaaaagttagctgggcatgatggcgggtgtctgtaatcccagctacttgggaggctcaggcaggagaatcgcttgaacccgggtggcgaaggttgcagtgagcagagatcgcgccactgcactgtagcctgggggacagagcgaaactttgtctcaaaataataatattttatgtgaaaataaatgtaataaaggttaagcttagtattttaaagtttgtttattcctagggagtaatagttcccacattaaacatgaagagtttttcaaaactcagtgatcattctaattggtatgaagcatgcaggaggtaattagcttaagatgcaatggtggaaaacatgcataatttatatacaagccttgttacatgtgcagctatgaaagagttctttttcatatggtcagttatatgttatatgtcgacaagataattaaaagtagatttataagccaaaatttaatgatggttaagttaatggaaattttccctcaattaaaaacattcaacaataatgtaatatcacctcacctgggtgaaatgagtttattttatcttattatttttttaataggctttactttttagagcagttttaggtttacactgtgaaattgagaagaaggtacagagatttctcatgtattttcttcctcccatcacgtatgtacagccgcctccattattaatatctgtctccagagtggtacatcattataattgatgaatctacacatcattatcacccaaaatttcttttatttttaattaaaaatttttttaaaaaatagtacaaagccccctgaaccttgctgaaggtgtttttttttgttttttgtttgtttgtttgtttgtttgtttttgagacagggtttcacttccattgtctaggctggagtgcaatggtgtgatctcggctcactgcagcctctacctcgtgggttcaagtgattctcctgcctcagcctcctgagtagctgggattagaggcatgtgccactgcacccgagtaatttttttttttgtatttttttttttagaggtgggcttttgccttgttgcgcaagctggtctccaactcctgaactcaaacagtctgcctgccttggcttcccaaagtgctggggttacaggcattagcctctgaacccagctggtgccctataactcttgaacactttagtgtgttttttccacaaacaagaatgttttcctgattaatcacaaaatagtcataacaatcaggaaataatattgatatatttccactgtctaatcctgaagtctccattaacattttgccatgttttccagtgatatcctttcttcttttttgaggcggagttttgctcttgttgcccaggctggagtgcaatggtaggatctttgctcactgcaacctctgcctcccacgttcaagcgattctccttcctcagcctcccaagtagctggaattacaggcacatgccaccatgcctggctaatttttgtatttttagtaaagacagggtttcaccacgttggtcaggctggtctcgaactcctgacctcaggtgatccgcctgccttggcctcccaaagtggtgggattacaggtgtgagccactgtgcccggctgtgttcatttttttttttttttacggctgaataatattctagtacatggataataccacattttgtttacccatttgtcagttgattgacattctgatttttccaccttttgccaattatgagtaatttcataacatataacgttataaatattcatgtacaagtttttgtgtgggcatatgtgctcgtttctttggggtatatacctaagagtagaattgctggatcatatggtaactgtatatttaaccatttgaggaactgccagcctgttttcccaggtagttgcactattttccatttccaccatcagtgtgtgagcgttccagtttctccacattgttgtcagcatttgtggactgtctctttatttaaattcaattaaattttttgagacagaatctcactgtcacctaggcgggagtgcagtggtgctatcttggctcactgtaacctctgtctcccggattcaagccattctcatgcctcaaccttttgagtagctgggattatgggtgtgcattactatgcccggctaattctcgtatttttagtagagacgaggtttcaccgtgttggcctggctggcctcgaactcttgacctcaggtgatcctcccgcctcgtgaccaaccacgcctggccaacggtctctgtttttaagagacagggtcagtctctgtcgcccaggctggagtacagcggcatgatcataagctcactgtaatctggaactcatgggctcaagcaagcctccagccttagtctccctagtagctaggactagaggtagacactaccacatgtggttactattttttctttttctttcttttcttttttttttttttttaaagttgaagtcttaatctgtcgcccaggctagagtgtagtggcgtgatctcggctcactgcaatctctgcctcccgggttcaagtgattctcctgtctcagcctcccaagtagcagggattacgggtgcccgccactgtgcgcagctaatttttatatttttattagagatggggtttcaccatcttggccaggctggtctcgaactcctgacctcatgatccacccgcctcggcctcccaaagtgctgggattataggcatgagccactgttcccggccttttctttgtttttgttgtgtgttttgtgtgtgtgtgtgtgtgtgtgtgtgtgtgcgcgcgcgcatacttttaggtgttatatataagaaactattgcctaatccagagtctttgaagattttctcctaggagttttatagttttagctcttacatttagatctttgatccattttgagttaatttttgcatatgttgtaaagtaggggttcatatttactcttttgcatgtcactatccagttgacccaacaccatttgtttaaaagccttttctttccctcgttaaattgttttggcatcttcgtcaaaaattacccataaatgtgcagttttatttctggactctgaattccattgatctatatgtctatctgtatgccagtacttcagtgtttttattactgtacttttatagttttaaaattgtgacgtatcttctacctttgttcttccgtttcaggattattttggctattctatagcccctgaatttccatataaattttaggatcatttgttaatttctgccacaaaggcagctgggattttgacagtaattatattgaatctgtagataaacttggggagccatcttaatgatagtaacttttctgatccatgaacatggatgtcttttcatttacatcatcttaaaatttctttcaatgatgttttgtagttttcagtgtttagtttttttttttttttcctttagagatggggtcttggtatgtcatgcaggctggaatgcagtggtgtgatcatagctcactgcagccttgaactcctgtgctcaagtgatcatcctgcctcagtctctcagtagtctgggactacaggtgcgtgctactgtgcccggctgattttcgtattttttgtagagccagcatctcacttcattgctcaggctggtcccaaactcctggcctcaagcagtcctcccactgtggcctccccaagtgctggtattacaggagtgaactaccgcacccagccggttttcagtgtttcagtctcgtacagtcatgcgcagcataatgatgttctggtcaatgatggacagcatatatgatggtggtcccataagattataacagctgaaaaattcctaacacctagtgacatggtagccgtcctaatgttgtagcacaatgcattactcttgtgtttgtggtgattctggtgtaaacaaacctacttcgctactagtcgttatagaagagcaaaggcagaagacacacacatcacaattttaaaactatgaaagtacaataataaagacactgtggtactggcatacagatacacatatagatgtagcagctggttgtccaggctgggtggggtgctgcccccatgcctataatcccagctttttgggagcccgagatggaaggacggcttgagttcagaagttcaaggttacagtgataataataaagattattactggtatatgtatttatgatattgtactttttattttagagtttactcctacttattaaaaaaaagttaactgtaaaggagtctcaggcagtccttcaggaggattccagatgaaggcattgttatcagaggagatgacagttccataagtgttattgcctgtgatgaccttccagtggaacaagatgtggaggtggaagacagtgatattgatgatcctgaccctgtgtagggttaggctaatacgtctgtgtctcggtttttaacaaaaaaagttaaagaaaaaaaaaatagagaaaagagaaaatgatataaagaaaaaaatgttgtacaactgcataatgtatttttattacaacagtcaaaagtttatgaggtaaaaattacagtaaaggttaatttattattggagagagaaaatttaagaaataaatttagcgtagcataaatctacagtgtttttaaagtctacagtactgtacagtaatgtcctaggccctcctattacccagacatgttctagtcctgtaagctgcgttgatggtaagtgccctatgcaggtataccattttttatcttttatgctgtgttgttactgtaccttctctatgtttaggtattcaaatgcttaccattatgttaaaactctctatagtattccatatggtaacatactgtacaggtttgtcgtgtaggagcagtaggctataccatatagcctagtgtgtagtatgctctttcatctagatttgcgaagtttactctgtgatgtttgcacagtgacagaattgtctaatgacgcatttctcagaatgtatccctgttaagtgatgcatgactgtacttctgtttctaaatttattcctaaatattttattctttttctgttgtgaatggaatttgtaattttttttcagattacaattatcatataaaaatacagttgattttgtatattgatctttcatggttacttaaacttgaattaaaattacatttaaaattacattttgcatttccactagctaccattcaagcgcttcatagctacatgtggctagtgactaccatatttagtagcacagatttgattattttcaacgttgcagttttattagataccaaataaaaacaaaaaaatgagtaccccttttacctctaatttccctctgtccagaggtgcttcatttatgtatttatttattttttgagacagaatctcgctctgtcgcccagactggagtgcagtggcatggtcttctctcacagcaacctctgcctcccgggctcaagtgattctcctgcctcagcctcctgagtagctaggactacaggcatgtgccaccacgcctggctggtggctcattcctgtaatgtttttatatttttagtagagatggggttttaccatgttggccaggctggtctcgaactttttacctcaagtggtctgtccaccttggcgttccaaagtgttgggattacaggcgtgagccaccatgccaggcccagaggtactttaaactcttatctgtttcttctggtacttgtctccatatgtccatgtgatatgcccatattgctattttttgagattcagacatttttactatgagatatggtaacttagctttcttatatttcttcctatcttcttaacatgtagatttagcaacttttagatttattcattgtatccattatatctatataagtaatcacagctgaagcatagagtggattgtgattagattttatttatttatttatttttgagacaaggtttgactctgtcgcccaggttggagtgcggtggcgcaatctcagttcactgcaacctccacctcccgggctcaagccaacctcccaccttggcctccaagtagctgggactacaggcacgcttcaccacgccctgctaatttttgtattttttatagagacagggtttcgccatgttgcccaggctggtctcaaactcctgagctcaagtgatcttctcgcctcagcctcccaaagtgctgggattacaggtgtgagccactgcacccagccaattagacttcttaaattttttcttttccttggccctaataattcatttttttgacttgcttagttacctgtgaatctatctttaattcatctctaaactctcctctggatgtatgaatcttatatgaacatactgaaacatatcagtaaactaccaattgtcaagaccttcgaagggactgaatttttaccctgtctggaagttaacaggttagccagggagttttgtagatgctgtggcaaaagatgtgagacttctgggtcaaaggcgtaggactttattacagcaacaataatagccagcatattagcattttcttgcactatactggttcccaaggccccagttcacatattgtgataagaagaggcccaggtgatacttgtatatgcaagggttgtattacagggaagaacctgaatttaggtaacctaaatcttttatattggtctgtaaacatgcctgccctttgctccagagggatatgctatcttagtatcttctaagactgttttcgatataaacatttctggaaaagatggtgtggaataaaggtagtcagtacctctgctcacatgagtgcagagacctatggaaaattgtcttctaatatcagtttcatccatcctccccacaagaagacataagtgtgtcccctttgccattctccaatctggattgtctggattgttaacgttttagtcctgcttctcagctgcatctcagaagtttcctttgctgtcaaccttggatttcccttttcctctttgatgtagatcctattttctggatcccatgcttctttctaggctttccgttttgacagtgcatatcctctggtgcttcctgacaaagaatacatggaaagttaaaaaaagaagactgggtacggtggctcattcctgtaatcctagcactttgggaggtcatggtaagaggattgctggagctcaggtgggaagactagcctgagcaacatggtgagttgtttctactaaaaataaaataaaaaaaaaaattagccaggcgtggtggtgcgtgcttctagtccagactacttgggaggctgaggctagaggattgcttgagcctgagagtttgaagctgcagtgagctgtcattgcaccactgcactctagcctgggcgacagagcaggaccctgtctcaacaaaagaaaacaacaaaaaacaaaaaacccaagaggccaggcgcagtggctcatgcctgtaatcccagcactttgggaggctgaggtgggcggatcacctgaggtctggagttccagaccagcctgatcaacatggagaaaccccgtctttactaaaaaaatacagaattaggcaggcatggtggcgcacgcctgtaatcccagctactcgggaggctgaggcaggagaatcgcttgaatctgggaggcagaggttgctgtgagccgagattacgccattgcactccagcctgggcaacaagagcaaaactgtctcaaaaaaaaaaaaaaaaaaaaaacaccccaccaagaaacccctggtgtgctgaaaatcttcaactttcactagatggtttgactagatgtagaattatagattggaaataattttttccccagattgtaaaggcattcttttagtttattgtctcctagcttttgttgttgcctttgaaaagtcaagtagtgttttgattctcagttctttgtatatagttttttttctctctctctgaaagcttatggaatcatttattcctcatgatgatgatccttcctacgggtctttttcattaattgtactgcacacttaatgagtgcagttagtggagacatacttttcaggtctgaaaaaattaacttgtgttttttttgagacaaggtcttgctctgtcacccaggctggagggcagtgttgcaatcatggctcactacgagctcagactcctgggatctcatgtcttagcctcccaagtagctgggatcacaggcctgtgccatcacaccaggctaattttttaatttaatgaaattttattttattttatttattttgagacagagtctcgctctgttgcccaggctggagtgcattggcgtgatcttggctcactgcaacctcttcctctcaggtttgagcaattctcctgcctcagcctcccgagtagctgggactacaggcgcgtgctgccacgcccggctaattttttgtattttagtagagacgggaatctcaccatgttacccaggctggtctcgaactcctgagctcaggcgatccacccaccttggcctccgaaagtgctatgattgcaggcgttagccaccattccagtccaaatttttaaattttttgtggagatgatgtctcaccatgttgcccagtctcgaactcctgggctcaagcaatcttcctgcctcgacctcccagagtgttgggattataggcatgaactaccacactcggcagcatattttaaaatgcagttatttctgaaagtttttggttttacacaatttttttttttttaggtaataagatgtattgtaaggattatgcttacgtatggtacagagtatacttcacattgttcctgtcttttttgtgggggagggaatgaccgaaagcattgggaatgttaaaggcaaatgagtaaaaagaaaactaaaaaacgattacttcttcaaataatgaggaaagcgtttttaaaatttttgtctgtttttaaaaagcaagtttcatgttagatttcttaccacactcaattttttcctaatataaaatagatataaaatttgtgatttgttactttttatgtaagcatatatagtccagtctaaaatgaccaacttccaaatgtgttccagaaaagaatcatgacattttatagctgaaaaggacctaaaaatccagtccttttaatataacatatggtaactgactccttgggagtataaattaattatttaagagcaagtaagatagtagcagagctagaacaataactcagatgcccttatccattctaatatccacagcatttctagaaacctcacttaaggcattaatgtgataggttttactcaaaatagtcaaccacaaatgtagcaaatacctaggtgactttatgttctgaatctcacgaagattaacctctgatcatttgttttatttctaaataacctcctttttctaaagtgctcctctgacactttggtgtgtaggtgaatatcaagttaacctgcctcagttatttccagtttgtctatacatatgttgtctaggcagatgatataacatattttaaaagtgtcatgttattgagaactgaagccagtatatgttaaatgattaaaaggaacaatttaaagaattttaggattctttggtctcaagtgacagaaactgaatttggtttttggggttttttgtttgtttgtttgtttgtttgtttgagacagagtctcactctgttacccaggctggagtgcagtggcgcagtcttggctcactgcagcctccgcctcctggcttcaaacgattctcctgcctcagcctcccaagtagctgggactacaggtgtggaccaccacacctggctaatttttgtatttttagtagagatgaggtttcaccatattgaccaggctgtctcgaactcctgacctcctgtgatccatccgcctcagcctcctgaagtgctgggattacagccatgagccactgtgcctggcctgtttgtgtgtgtgtgtgtgtgtgtgtgtgtgtgtgtgtgtgtgtgtttgtttgtttgtttgtttttgagacagggccttgctctgttgaccaggctggagcgcagtggtagttagtcatagctcgctatatcttcactgcagctttgaactcctgggctcaagtgatcctcccttctctgcctcccaagtagctgggactacaggtgtatgccaccatgcctggcaagtttttaaattttatttttattttttattttttgtagagacaaggtctttctctgttgcccaggctgatcttgaactcctggcctcaagtgattcttctgccttgtcttcccaaagtgccaggattacaggtgtgagccaccacagccagccagaaatgtagtttgaacaaacttaaacaacaaaacgtaaatttattagttattaattaaaccatgtgaaggaacaggaatcactggaatcaggaactcaaacacttttagaattctgtgtctcgtttctgcttctttatgcatgttggcttcatcctttcagatgggcatactccattttctgtgagatatcctttcatgtgttttaggccttgtatattaatagttctgacatcagaagacaaaagcattctctcttttagaatcagtttgaaaaatccagccaggcatggtgattcacacctgtaattccagcactttgggaggctgaggtgggcagatcacttaaatccatgagtttgagaccagcctgactaacatggcgaaacccaatctctactaaaacaaaccacaaattagctgggtgtaatgatgcacgtctgtaatcttagctgctccggagactgaggcacaagaactgcttgagcctgggaggcagaggttgcagtgagccaatatcgtgccactgcacttcagcctgggtgacagagtgagactctgtctcaaaaaaacaaaaaacaaaagaaaaatccatggagggatctatgtcatggtcctgttgcttgaacaaaatcactgtgggcctaaaatgggcaaatgtattggaatttccttagtgtaggtcagactgtggggtgtgggatggagagaaggcattttgttttcctttttaatcaagatgcttctgagacaaatgtgatctgctatgacagattaaggtttttttaaataacataaccagtctttttatatatgcctttatattttccttcattttcatatgaactgaagacttctaattcccaagttgatagaattttcactgattacattttcacttgagttcttatgagtgatgtcttaatttagagtattcagcctgtagtttctctcatttgtagaatgtacaaagatcccaaatctgtactttgcttaatgtgaaaaaatcaatatttttaaaatctgttgtagttagacaatatacaggttatattcaaatatgtgcaagtatataaatgtatgtgtcttagttcattggtccttctaaaacaaaatatcttaggctggggtaacttagcagagatttattgcttgcagttctagaggctgggaagtccaagatcaagacgtcagcagatttggtgtctgttgatgacctgttcctcataaatggtgccttctgtgtgtcctcatttggcagaagggacaaacaagctcccttggacctcttttataagggcactaatcccattcatgaaggctctgcctaatcacctcctaaaggctccacctcttaataccatcaacatcagtgttaggttccaacatgtacatttttgggggggggacacaaaaattcagactatagcaatgaatatttagaaattaagcagttttggccaggtatggtggttcatgcctgtaatcccagcagtttgggaggctgaggcgggtggatcatgaggtcaagagattgagaccatcctggccaacatggtaaaaccccgtgcctgctaaaagtacagaaattagctgggcgtggtggtgcatgcctgtagtcccagctactcaggaggctgaggcaggagaatcgcctgaacctgggaggtggaggttgcagggagctaagattgcaccactgcactctagtctgggtgacagaacgagactccatctcaaaaaaaaaaaaaaaaaaaaaaagaagcagttgtaccctaaaggccttttaagttagttaatgtggtctattttattttaggatttaaaaaaacactttaaaataatttaaaaacaatttgtgttgtcatgtgaggtcggttatcaatgataaaggttcttattggtaagaggatgaggaatgctttaaacaaaaggcgaagtgttgggtggagcagattatttggcttagatttttgagaagctggaaaggagaaatgggatatgatgaagggaaacaaatttggtggtttgggatagaacagttgaggcactgtaaacatgaggtaagaagaattaaagcagtgtaagtagtggaggacagagatggtaagaatagagagagatgaacaggctaaagaagcagtttagcaaaatggagaatttagataccaggaatgacctgattcaggctagtaagtgacgtttgcctagagatcagtctaactggggctcaagatatggcctagctgtgaaacaacagatgatgagtgagaagcccagcatgcagaaaagaagtttgcttggcaaaccagagattctaccaatatttagggacatggctttccaagatcaggaaacttctgagtttagaacattgactcaacacaaggttaaatgggactcttgtttagtctcctttgactcttatgctgttgctaatatcatttatgaaatcagcaaggaccaaaattagggtaacaactaattgttaccctttcaaggatgacgtatgctctgtttattcaagagtaatacattactgaggagaagcgtggcctcagcatgagcactagctccacaggtgtggctgatggctgtcagtgctttgtaaagcatgttctcttgaaaggagatctgaatatatgtgtctggctgccacagcaatccttgcttgaaataaaattttccattactgttagaaaagtcccagagaagtctcctgttggcctgtcttgagtcagtgccttagcctgtcagtggccaacaggttggtgtgcttttggcaggcttgggtcatgtgtcccttcctgaggggatgggagtcaattctcgggcttaaatcaccatatgaaagtgaaattctgttactagagaacagtaatggatgctgaacaagaaaatgtttggcttggtgtggtagtgtgtgcctctagtcccagctgcttgggaggcagaggcaggaggatcacttgagcccaggagttggagtctaacctgggcaacgtagtaagaccctgtctcagaaaagaaaaaagttctctataatggtggtttgctgcactgaattttttcttggcaggggacagtttgctgcactgaattttctctttttgtaggagacagtatagaagttgacagaatgctaaggaaaacagaatgaaaactaaaaaaaaggagaaaggcagagcctgttgtgttgcatggcaataaaaccagatgaagaatgacctgttttcaaccagacagttccttatttctacttaaaacatgactgttctatgcaaatacaggaaaatttaaaagggccattaacatagacattctccatccttttgcctagattgaatgatgtcctgtgtcttatagtgtcatttattgagcgaggtaccctttctcaaagctgtgtctgtgctaagtttgcaggaatcgaaattttgagtgattgtactatattagtgaggaaggctagtgaaaaataattacttcccttgtgatccttcatgaatccttaggagatttagctaaaaataattttttgttagaggaaacatttctaatgagttctgctgttgacagatcagtttggaaagaaaagagctctgcagttgatcagcatagtaatatatttctagtttatttgtatgctggaccctggatgacatagttcctgtgatctcagttattctggcagtagctcagctagttcatatccacagttgtggcaaaaacttttgtactgaaacaagtgaagtacagataatgtgacatccagaatgtgctattgtggtctgtttttcatctaagcatgaaataatgatattgaaaaattgtttttaattataagaggaatatataatgttagataaaataacctgtactttcactgtgaatatttattttcttttaataacttctaatatagcagtataaggtcatgttgtttggacgttctgggggtagttgctttatattcacattcatgtaattgggagtgtattacctttgggtcccactacattttaaatattgagttttactatattttattttgttttttctactggtattttatttattttattttatttatttattttgagactgagtctcactctgttgcccaggctgaagtgcagtggtgcttcacttggctcactgcaacctctgtctcctgggttcaagctattctcctgcctcagccttccaagtagctgggatgacaggtgtgggccaccgtgcctggctaatttttatatgtttagtagagatggggtttctccatgtcgggcaggccggtcttgaactcctgacctcaggtgatccacctggcttggcctccgaaagtgctaggattacaggtgtgagccaccacacctagcctatattttaaatacttttttgttttgagatggtctcactctgttgcccagactggagtgcagtgacctgatctcagctcactgcagcctcacctcctgagttcaagtgattctcctgcctcagcctcctgaggagctgggactacaggcatacaccaccacgcccggctatttttcgtatttttagtagagacagggttttaccatattggccaggctggtcttgaactcctggcctcaagtgatccgcctgcctcggccttgcaaacttttgggattacaggtgtggcccagtgcacctggcagtattttaaatacttttacattaaaaaaaaatttttcgtgagtatataggagtaggtgtatatatttatgggttacctgagatattttgatacaggcatacaatgtgtaataatcacattagggtaaatgggatgtccatcacctcaaacatttaccctttgtattataaacaatccaactatactctcagttattttaaaatgtacaattaaattattttttatgaaatcaccctgttgtgctagcaaatactaggtcttactcattcttttctatttttcgtatccattaaccattctcacttacccctacctccaccattctcactttccccctactccccactcccctacctccctatctttccctctacctcctcctgtcctacctccccactttccccctacccttcccatcctctggtaaccatccttctactctctatttctgtgagttcaattgttttaatttttaactcccacaaataagtgagaacatgcgatctttctgtgcctggcttgtttcacttaatataatgacctccagttccatctatgttgttgcaaatgactgaatctcattattttttatggccgaatagtactccattgggcatatgtaccatattttcttttcttttctttttttttgagacagagttttgcttttgttacccaggctggagtgcaatggtgcgatctcggctcactgcaacctctgcctcctgggttcaagcaattctcctgcctcagactcccaagtagctgggattacaggcatgtgccaccatgcctggctaattttgtatttttagtagagacggggttttaccatgttggtcaggctggtctcaaatgcctgacctcaggtgatctgcccaccttggcctcccaaagtgctggaattataggcgtgagccatggtacctggcctgtaccatattttctttgtccattcatcttttttttttttttaagttttattttgagacagagtttcttgtccaggttggggtgtagtggcatgatcttggctcactgcaacccccgcctcctgggttcaagtgattctcctgcctcaggctcctgagtagctgggattacaggcatctgtcaccacacccagctaatttttgtatttttagtagagacggggtttcaccatgttggtcaggctactcttgaattcctgacctcaaatgatctgcccgcctcagcctcccaaagtgttgggattacaggcgtgagccactgtggctggcagggaaagatacttgtacatgggtcaggaattgaacccgggtctcctgtgtgaaaggcgagaattctaccactgaaccaccattgcgctgacttatccgtagagcagataaacgaacagcaaccttggtcctttaaacttcatcttgaacttagaaataacaagaaaagacccttgagccccaaataactttttgacgagcatgcaaatgtaaaatacacttcagaaaggtttaaaaatcttttggacctcttatgctttataattattccttatagttgactaggatagaatacttaaagtttctattcttttatattaatgcacatacatatttttttaatttttttttttttttcaagagacagggtcttgctttgttacccaggccagagtgcagtgatatgatcatggctcactgcatctttggcttctgggctcaagtcatcctcccacctcaacctctctagtagataggactacaggggtccaccatcatgcctggctgattttctaaacttttgtggagttgaggtctcacaatgttgcccaggctggtcttgaactcctgtctttaagcaatgctcccgcctcagcctcctaacgttgtggaattacagacatgaactgccacgcctggccagcgttatgctttactccttttgataatggaagtaatacatgcccaagttaaaaaaaaattaagccatactgaaaacattttaaaaatacaaatcaactttatttccaacattcagagaaaacttaggttatcattttggagcttactttttggacttttttttgtgcttgtatttacacacaggcacatacagaattatgatgattatgttcaagatgctttgtaaccagctttttttcacttagttatatcgtagatatctttacatagcagtaatgcatagtaataccattttaaattactgcattaatgtactatatgaatgtattgtttagtcagcctcatgctttttctctttcatcattaaatgagttcatgaacatgaatattcttgtctgtacctttttcttatttcattattgtataatttaaagctacaaatgtagcagaacttgtaaaacttcagagtgaaatattgaagcccttgaggtgttggtattttttttattttattttttgttactctgggatcaagattaggaaaaatatttctctctctcaggctacgtgttttctggggctgttatctttttttttttttttttttttttttgagacggagtctcactctgttgcccaggctagagtacagtgccatgatcttggctcactgccttctctgcctcccgggttcacactgttctcctacctcagcctcctgagtagctgggactacaggcgcccgccaccatgcctggctaattttttgtatttttagtagagacggggtttcaccgtgttagccaggatggtctcaatctcctgacctcatgatctgcccgcctcagcctcacaaagagctgggattacaggcgtgagccaccgtgcccggccggggctgttatcttaatgcttacaggactttatttgtatttttatctttgtttatttttgttttttaaatttttttactttttgtgtttttttccatattggttttttcatgttcatatgtaaactgtcatagtatttcttagacatcattaatggatagaaatcttaattttaaaatggaaaagaagaatgagtctaactgcatgtgtcaacttaatttattttaaaaattacttaatgtttagctgggcctggtggctcatgcctgtaatcccggcacttcaggaggctgaggcaggccaatgaatcacttgagtctaggagttcgagaccagcttgggcaacatggcaatttacatcttttagggttataacacttacaatgtttgggaaggaaggatccttttattacttttagtttatcatgattattattaccattttatttatcatattatttataatttttttcttaaaatttttttttcctggatgctcttatagggttaaacattattatcactttaatcagacattatgttatggccacatttcacatattagagtgaaaggaaaagaggaattcagaaaagcagaagaaagtgagtcaaaatttatacgttcaaatcagtgctacctttccaagcaatatatactttgctgccactgctcaaattgtccattggatctcattttctagataatggctttagggttttatttgcatctgtgcaaagatgtgtctattcaacatgaaaacattagtgagttcagtcaatagtttggtttggggtttatgtgataccagtagttttcaattctggtggattagtttttttactttctggtggactcagcagaatcgttgtgatgagttttttggtaggttagtttgctagaaatgggttatttttgaattaatgatcactggtttgttttttttcccagtcagcagataagcagagagccctagaagaaaccaaagcctacaccacccaatccttagcaagtgttgcctatctgataaacaccttggccaacaatgtcctgcagatgctggatatccaggcatcccagctacgaaggatggaatcttcaatcaatcatatttcacaagtgagaccacaatattttcctatttgcctatgaggaacccttaataataaacacaggctatctgtaatgctggcagcttttattatgtaagttaactcacatgtacgatttggaaaatagcaacttaatattaggttgtttttagattctgtctttttgtgggatggttatcttctctgtgattttgataggaaagtaaatcgtaatgaattttattaaaactcagttgtcatggtaacataatcagccctataatgaaacttcatccattcccccgcctttttttttttttaaaacaaatttcatacttctttatcaatttaaaaagataaacttgatagattggtggcttgttcaaaaatttttttttcttttggtaggatttatgtttactgggatggtaccatacctgcaataatggaaagactagcaaaccttatgaaattatttttattatatataatttaaaaaaaagtgtattacttcatgggcttgtaaaagttttttaaaaaatgttaatctgtcttcattataaaagccatactcatgaaaacccagaaaaagaagagaaaaagtagaaaaataaaccattttaccacttcccaagcttttctctgttaatattttggtatatctccttgtaatcctttttcctgtaagtagttttttttaaatgtaactgtgggctgggcacacatctgtaatcccagcactttgggaggctgaggtgggaggatcgcttcagcccaggagttccagaccagcctgggcagcatagcaaaaccctgttctctaccaaaaatacaaaaattagccaggtttggtggtgcacgcctgttgtcccagctacttgggaggctaaggtgggaggatcatctgagcatgcggaggtctagactatattgagctgtgattatgacatgcccttcagcctgggagacagagtgaaaccctgtctccaaaaaaaaataaaaaaaagtagccaggattataatagagtcagttatagaataggtataaaattttgggttctgcttttttaacttagcgttaaggcaaacataatctcttgatgttgtaagttcttcataaacattctcagtggctgcataatgttgcgtgtatatgttgtacctttcataatcattcccatattttggggccatttaaaataatactgcagtgaaaaaccaattaagttgtaaaatgcaatttaaaaaatataaaaatgataaaggttttggtctgcctccctttttttgaatagatctttgaaatgttctattttagcactcttgtcatttgaatgattattattcaacactctttttagacctaaatgattagaactattttggaatgaaaataatttttaaatgtgcatattattattatttttaatgtcttgagagttcagggctcttttcaaatgaactaaccatctttgagagtctaaagtttagcaaatttgtataactagaccaaatatagtccagataataaaatcagatatggtatttttgaaaatttgtcagaccaatttagagagatttcttatttaatattacttaatctgaaatctgaatttgccattataagggtttcttcacattttatacaaacttctgcagacatatcatttattgcttgttatattgtgtatcttaagttaaaaaaaaattggtgcgttttaatgagtgtaaggtaaatttcagttgggaaaggcctcctgaaggaaataatcaatgggattttaaatgacgaaatagatgaattttttttttttttaagagacaaagtcttgccctgtttcccaggctggagtatagttgtacaatcatggctcactgcaacctcgaactcctgggctcaagggatcctcctgcctcagcctctcaagtagctggctgggactacaggcacgtgccatgcttggctgattttttttttttttttttttttttttttttttgtagagacagtgtcttgccatcatgctggggctggtcctgaaatcctgggctcaagcagtctcccaccttagtctcccaaggtgttgggattacaggtgtgagccagtactcctggcctgaacttggttttctgtagaaggagggaggttgacaaattgctaatgtgatatagaatttcaagatctattcttgagaatcctaaaatttttccatgtttgaagcattagcaaaggatgttaaaaagaaacgttaaaaaaaagaacaaatatagaagagaaactagtatatttgagttcctaaaaaggaggaacaagttttactaggcattaggggagagtaggagagattatgtgggtaaatgatgacaacaagcaaatagcaatgaaggataataatttattttctgtttagaattttgtagtactttggtagaaaagtgttagcaagctcaaggaggaaggtgaatactcagccaccctagattttgagtatatgtattaattcagttattcagaacattttctttaggagtatcatataaattggcgtttaattaatgtggtcaattaatgctgtcttttaaagctatcttaatggattaagtaaaaaacagaagaatggatagagattaataaactggaaattacagaggcctcagtcaaagctgtcaggaatacgtcgaaccttcttttttcagagttgagtgtctagagggcaatagttggaggggtaatagatctgcaattctcagtggctgttaagtttatacagaatataaattattatgttggataaaggatcaagtctgagaaataggctgatagaggctatatttaagaaataagagtaattttaaaaatttatgtattttctagcatttgcctcaaggattgaaattttttttttttacttgtgtttacaggtagaattctttatttaaaaagtcagttgaatatcaaaactatttgatattcttcagactggaatattattctctagtgtagaagaaaacattttctgcttacaaaacaaatagtaaatactctaaaataggggttggcaaacttttcttaaataaaaggccagatggtaactattttaggttttgtgggccatgtgttgataactattttaggttttgtgggctacgtatggtgtcattctcctattctctctctctctctctctctctctctctctctctctctctttctgtgtgtatgtgtgtgtgtgtacttttttttttttggttgggggatggggtctcatgatgttgcccagggtggtcttgaactcctggtctcaagtgatcctcccacctcagcctcccaaagtgctgggattacaggcatgagccaccatgcccagcaaagagagatgacattgcatgtaaggatagagatgtggacagatttgagagacagtttaattacgttttcttttcttttttgtgtgtgtatttttaaacaatgatttaaaaatgttaaaactattcttagcttctgggccatataaaagcaggcagcgggccacattctggcatggagccttagtttgccagcccctgctctaaaatactttttccaaatgtttgagtgttaaattttattatgatgcttgtattattatttaaaatattgtgtgtttctagagggaaccagggggttcttgagaccagatttttgtgcaacttgggcaaaaatactagattccgagagtttgtagagaagattgagttgaaggaatggagggttcagtcaggtcaaagacaagatcacacatttattggaatggcaataagcctcaagagttgtaagggtagagttgtttaggactagtagatactagttatctagggtattgagtttcttttcccattagtattcttttctctattgcctgggtaagaactttaccacctttcagcctcctagccctttcatctattttaacgaaaaagaacgctgagttggcctgaaaaagatcagggcatctaggctttaccctgactcttctgctgacttgtgtgacatttgacttctttgaacttaggttttttcatctgtaaggtaggactgtttagataatttcttaaatgttttccatcttgaattccttatttttgcgattctcacaaatgagcttgattttatttgcttccattctgttctgttggttctgctctttacctcaatctgtgtccactggtctcaaccctctattactttaatgtaactgaactgtttcccaaattactctgaattgtaatccgaggatgggaattccattgactgtactctgtatcggggagaaatacttcaacaaaacaaagtaataacccactctttctaaatgtcaaatgttttcaaaaacaagatattaattgattaggaatatatagtatcagacacttttttgtattaaaaggacaatatagtattaagtagtatactaatttttactacattcatcatatctataaggcagtattagggttggttcttaacatggattatgttatgtattttagggctggtaaattttaaagaaatttcatctctagctttgttgctgttatcctattcattctttggaaggatattattaaaacaaatgaaaatttttatcttcaaactgatagtggagttaaattaacattaaatatttcccctaaatatatacttatcagagcaaacatgtaattttactgaatacttgtacaggtacacatacctttaagtcagtatagtgtaacattattataaggatgaatgttgcttactgtgcccattattttgtgtccttttctggtaagttttttttaataaaaagtttgcaaaacacttttcaaactaaaactcttatcagtttgtaaactaaaatttttcttttttctttttatttttattttatttatttatttatttttaattgatcattcttgggtgtttctcgcagagggggagttggcagggtcataggataatagtggagggaaggtcagcagataaacaagtgaacaaaggtctctggttttcctaggcagaggaccctgcggccttccgcagtgtttgtgtccctgggtacttgagattagggagtggtgatgactcttaacgagcatgctgccttcaagcatctgtttaacaaagcacatcttgcaccgcccttaatccatttaaccctgagtggacacagcacatgtttcagagagcacagggttggggctaaggtcaccgatcaacaggatcccaaggcagaagaatttttcttggtacagaacaaaatgaaaagtctcccatgtctacttctttctacacagacacggcaaccatccgatttcccaatcttttccccacctttcccccctttctattccacaaaaccgccattgtcatcccggcccgttctcaatgagctgttgggtacacctcccagacggggtggtggccgggcagaggggctcctcacatcccagtaggggcggccgggcagaggcgcccctcatctcccagacggggcggctggccgggcggggggctgacccccccacctccctcccggacggggcgggtggctgggcgggggactgactcccccacctccctcccagacggggcagctggccgggcagaggggctcctcacttcccagacggggtggctgccgggcgtaggggctcctcacttctcagacggggcggctgccgggcggaggggctcctcacttctcagacggggcggttgccaggcggagggtctcctcacttctcagatggggcggccgggcagagacgctcctcacctcccagacggggtcgcggctgggcgccctcatatcccagacggggcggcggggcagaggcgctccccacatctcaggcgatgggcggctgggcagagacgctcctcacttcctagacgggatggcggccaggaagaggcgctcctcactttccagactgggcagccaggcagaggggctcctcacgtcccagacgatgggcagccacgcagagacgctcctcacttcccagatggggtggcggccgggcagaggctgcaatctcggcactttgggaggccaaggcaggcggctgggaggtggaggttgtagcgagccgagatcacgccactgcactccagcctgggcaccattgagcactgagtgaaccagactctgtctgcaatcccggcacctcgggaggccgaggctggcggatcactcgcggttaggagctggagaccagcccggccaacacagcgaaaccccgtctccaccaaaaaagtacgaaaaccagtcaggcgtggcggcgcgcgcctgtaatcgcaggcactcggcaggctgaggcaggagaatcaggcagggaggttgcagtgagccaagatggcagcagtacagtccagcttctgctcggcatcagagggagaccgtggaaagagagggagagggagaccatgggccgtggggagagggagagggagagggagcgggagagggagagggagactaaactaaaatttttctaagcgaggcccatcttttttctttgctagtaaaattagtcagtacttatccatgttcaagtttgtcatggcttagaaaaaaagattaagcaaggtcaaaaggcaacataaagaacttaagaaagtagtgctcttcccaccttcccaagggctgagtaggacttactgggccaggtgttaaattagttagcaggtaacaattaaaggagctggaaaataattatcataaaataatataaaattggaagtaattcttctcaagagctaggtattgaaaggcagtggccttaagaactcaacaagtagggtagcttttactgtctaaaaactttaggctgggtgtggtggctcatgcctgtagtcccagcactttgggaggctgaggcaggcggatcccttgaggtcaggagtttgagaccagcctagccaacatggcaaaattccatctctccaaaaaatgcaaaaattagccaggtgtggtggtgcacacttgtagtcccagctactcaggaggctgaggcgggagtatcacttgagcccaggtggtcgaggctgcagtgagccatgttcatgccactggattcaagcatgggcaacagagtgagacactgtctcaacaacccaaaacacaaaaactttatatagatagccttgcttaagaatttctaattttggccaggctccgtggctcacgcctgtaatcccagcactttgagaggctaagggtggccggatcacctgaggtcaggagtttgagaccagcctggccaacatagtgaaaccctgtcgctactaaaaatacaaaaattagctgggtgtggtagtgggcacctgtaatcccagctactctggaggctgaggtaggagaattgcttgaacctgggagcggaggttgcagtgagctgagatcgtgccactgcattccagcctgggtggcaaagcgagactctgtctcaaaaaaaaaaaaaaaaaaaaaggaatttccaattttaattaaggagatacactgaaggttatcaatacgtaattatgcatagaaagtagactttttatacttcccaattaatttcctatgtagtttttatatcactttatataaaaaaactgaaaattactctgttagtaactaatttgttttatgaatgatacataatttgaagcataattgtaatttaaatgtttatttgaaacattagcttactaataaaaaaaattgagacatatttaaaaacacccaatttagttgggttaatccactgtaactgtttgattgcagatgttttcccacactgatgggcagctaactgaggtagtgctatccagtacagtcaactttcaattatctgtggtaatgggaaatgacaatgcatggataatcctaaaacaaaatattttatacagtaccttcctgtcatctgctgtggcctgagcatgtgcttgggttcatgagggagatgtgggagtggggctcaggcttgcaaaggagctgggagtcagtatgattatctcaaggccataagaggtatccttaaggaacctgggtttggcactgtgtggctgaagtgtcatggggaaagcctgcagcatgcaagatcagcttggcaatatcagtgagaaggatggggaagctaattaataaggaactgtgggagaatagttgtttattaagtcctatacaattgcagtgatatatcttggtgtgttttttggttaatgggatctgtagcaaacaataattatattaattgtgtatttgaattagttttggtcatctttgattgctagcagaacacattttttacttgccacaggtgagtgctgttattgaggtctcttctaaataagtaggtttattgtcatataactagtaacttaaaaaacccagaataaatttgaaatacttttcttacttttaaaattcatcctaaatatcagtgttgaacttgtacttccaaaatttaacttaatgaaatttaacattgtaatgtcaaagaatatcatgagggcaaatgccataattactgatactgtgaatttgatgtaggaaaaatatagtagccatattttatttaagaatatgttacaggagctttcctaaatttcttttacaactgacaattgtctacgaatttatgaatgttaaagctgcatgatagatgtgaggagggagtgtttattattctatctaatttgaatatgcttattttctacaagtgaaagctataaaaaaattgaagcagatgattgctgaaaaccttagaatcttctggaccaacctgagaatcttctgcttgtttatgaaatagatttagtgctctctgtcaaattattcaaactccaaatagaaccgtagccattttctaaaggcatgttttcttctgcccacaggcaatactgcagttcaaccccgtgtggtagtatgatggcaagaatgcaaattataccgttgttagattacctttattattatagatgttttttaaaagttatttacttaaaatatctatacttaggcaaattagaggcgttgatcttgagtcgacttttgtgaccaaatttggaaacaattgcagtttgagattgaatgaggtaagggaccagctaattagtccttcctctatagatctttggttctcaaccagggaagttttgcccccaaggggacatttggcaatgttagacatttttggttgtcacatctcatggtgggggagtgctacagttatctacctggatgcttttctatattctgcaatcctcaagacagcagccttcacccctgcccacaacaaagaattatcaagcccaaaatgtcaatagtgccactgttgagttaccctgcccctagtgtttctaagatgtaggcattctttgaagtagacaattaaaaacatcatatagccaaactaaattattttgactttctgtatacttatgctgtttaaaaaacatgccttcagtttttactgagatttgatataaaaagcaacaacaaatatatttttaaagaatttaatcctgggaaacatttcactttcctgatgaattgatatatttcctcgtaactcattatgtttctattttgccttctctccctggaggcttagtgccaatttttttgctctattataacaatgaccctttattttaggcttattgttatctttctatttactgtattggtcttccctttttttttttttttttttactgttatggtctatgggtttgggctaagtgtgtgtttgtgtgtatatgaagagaacatgtgggtaatatgtaaatgtccccaatccctagaccaagtcacatctctataagatcaaatgaacagatttctaatttatattttaatgcttttttaaagtctcaatttttcaaacaagaaatatgtgcttgttataaaatattactgtgtgttagtgtaaataataagtggaagattacttctccctgttcattctctggagatttattaatatttctagtatgtgccaggcatagtggctcatgcctataatcccagcactttgggagactgaggcaggagcattgtttgaggtcaggagttcaagaccatcctgggcaacacagtgacatcccatctctacaaaaaataaaattagctgggcatggtggtacatgcctgtagtcctagctactcaggaggctgaggtaagaggatgcttgagcctaggagttcaagactacagtatgctatgattgtcccattgcactccagcctctgtgacagagtgagaacctgttgcaaaaaaatgtatatttatagtatgcagatgtgaaatagaagctataagcttgtaattctgttatggctgctcaggtttacactcttatagtttcatttctgaataagttaagtacatttctaaaaactgaggagaataaaaacaatgtcttgaggattgtgttatctgatgaaccttttattgatctgacgaagacccattttataaaaaaagtgtcatattttattttttgaagcatacttgatggtatgaaatggtatttctagcccatacttttaatgatttagaatgactcactaaactttattcaaggccagtacattggcttactcctgtaatcccagcactttgggaggccaaggtgggtggatcacttgagcttaggagttcaagacctgcctgggcaacatggaaaaaccccaactctacagacagtagagaaattaggccagcatggtggaacacgcctgtagtcccagctccttaggaagctcaggcgggagaatcatttcagcctgagaggtcgaggatgcagtgagccatgatcgggccagtccactccagcctgggcgacagagtgagatactgtctcataaaaataaaatttaatccaaatgtgattaatttccatttctctaaagttaaaaattaagtgaattccaatatcatcactaatatgcaagcttaacttttctgttacagttttcccaagcagttgaagaggaaagctattctcataattagcctaacatgcgtagaaaagtttagagattattttttttctttttctttttcttttcttttcttttttttttttaagatggagtctcgctctgttgcccaggctggagtgcagtggcacaatctcggctcattgcaagctctgcctcctgggttcacgccattctcctgcctcagccccccaagtagctgggactacaggcacccgccaccatgcccggctaatttttgtatttttagtagagacggggtttcaccgtgttagccaggatggtctcgatctccggactttgtgatccgcccaccttggcctcccaaagtgctgggattataggcgtgagccaccatgcctggctgagattgtttttttcttgaatacttaaaattgtaagattactaccatggttagttttttatttgatgttccatttatacattcgttagctctggaacatatagatcctgttgtttttaaggtctcttggttgtagagaaataagaggctttgaatttgtttcaggcttacctcatacttgaggcagtttagaaggataaatgatcagtgttcagatttcttaaagcagtattttataatgtcatgatgattatcttttcactgttactaccaggttcttttagaaaggggaaattgaagtaggacattgaagtgggactggggaggagttagcaaaaaatgtgtctgttgattgctgcttgagccaggaattggtggtaagagatgtgaaccattttagtgaagtgatttttcaaactcttttgactgcgacacacaggaaaaaattttttttacgttgtattcagcacataattcatgtatatatttatatatataataaacagacttttcaagaaacagtattttaccttactatgtgtacatgcagtctgatgtttctgttctatttgatttgaaataattgctgcttacataccactaaattgcagcttgcagtttaaaaaattttgctttagtgtactaattacctgtgtatgtggagaaattcaccctctgttagcaaatagaagattgtaattacaatacattcttactcgtatgtcttatgtgagcatttaataaatataaataaattaatgaaatattttacaggcattttgtcatgataaaatataagcagctttgcccaagcaacttggtcttttggggtcaaaaaatggcttttttgttttttgacacagggtcttgctctgtcacccaggctagagtgcagtggtgcattcatggctcactgcagctttgacctcctggactcaagcagttctcttatttcagcctctcagttagctgggattacaggcatgtgctgtcatacccagctactttttgtagagacggggtttcgccatgttgcccaggctggtcatgaactcctgggatcaagcaatctgcccaccttggcctcccaaagtgcttggattacgggcctgagccactgtgcctggctttatttttaacattatatttcagccctctttctttttaaataaaaagatgtttaaacatgaatagaaattatactaataggtcattagaaatgtaactagattaatttcgggggctttcttaatcactatattagtctaaatcttaatggagagggaaaaattagcatgctttaacccaggggttggcaaaccttttctgtaaaggagccagctaatatatacttcagtttttgtgggccataccatctctgttgtggctcatctctgccattacagtgtaaagcctagacagataagcaagtgagcggcatggctgtattccaataaaactttacttatggaaaagcaaatttgaattttatataattttcacgtgaaggttttttttggttgttcttttctccaaacattaaaaaatgtaaacaccactcttagcttgtgggctgtaaaaatcagatgatgggccagatttggcctgtgggccatggtttaccagcccttgctttaacctaaaaatggagaaaatcagtagtccagaagaataaaaatttagcaagcatagtttagaatatgagtagcaatattaaatctctaggcatatatattttgatttttgtggatattagaactatacatttttgtgttgttttttacattatattttgcagacagttgatattcataaagagaaagttgcaagaagagaaattggtattttgactaccaataaaaacacttcaaggacacataagattattgctccagccaaccttgaacgaccagttcgttatattagaaaacctattgactatacaattctagatgatattggacatggagtaaaggtaggtataatttttttcaagcttttaaaagtagtaacccataatgaaaccaactcttgagaaaattaagctttttatctgtctttctttcctagaggacaaagtcttggcccagttgtggttgtgaagattccttgctactataactgttttaccctttttgctttttcttagtgatgtattctcaagttttaaacagtcatctttgaatgaattatatttgcttggttatgataatacctcctatggtttgagtaaataagtgtcgtgtaatctttccaattttaatttaatatgactgattaaaaaatcattcatcatgttattatgaaagtgtttaccttatctcaagtatttatcagcagacttttggcattagttttcaaaaacaagatatattaatagacatgtactttgaatttttctaaaataattttatcccaacattttgggcaagaatagtgttaggtaaaagtgataggtgaattaatattgccactgcttttgagtgtgtagctattacatattttggctgtcttttaagatgtatttgggtgcctagaacatgcaaatttcatttaaattggtgtttgaacttaatgattcagagctttagctgagtattaatttatgtctgatcagtagtttgaaagacagtgacttatcagatgtgactaaataaatatacatgcttataatgatactgtacagttcatgtagttgattttttttctaatataaacatacttaaaaaacactgttatggatggaaatcagttaaatctaaatttaatggagatctaggtaaaaagaaaatatacactgtaaatttatttttaaaatctctttgtcttcagggttttgatgcaagcactattatctggaatatgatatttaatttaacttttttgagacagggtctcactctgtcacctaggctggagtgcagtggcacaatcatagctcgctccaaccttgtactcctgggctcaggtgatcttcccttgtcagcttccctgggactacaggcacgtgccaccatgctgagctaaattttttgtttgtagtgacagggcctgtctgtgttgcccagggtggtcatgaactcctgtacttaagtgatcttcccaccttggtctcccaaaatattgggattacaggtgtaagccatcgtgcctgcccaatatttaattttatagccaatacctacatgcatttagattactaataagagcatgttaaaataagatgtgtaattggatggttagttaataactgaaatttcttctaacttgggaaaatttattcaaggctaacaactgctaatggaatattttagaatacctctagaatctaatgccaaaaagacacttagaatataaaagatgacatttgtgtttgcccaattacataagaaaaaagtaatcccatttttttaaaatatataattcataggtttacatcccccattcttataatcctcaaagtaaaatgtttttctttcaggattctagccccttcattttttgactttcagtgtttaagggtcattaatttgaagaaatctttaatacagttaaattgtggaataaaacagtatcttaaattcatcagagaaacttctgttcatgacacattctgctttaaccactctttctatgatctactgaaacattattttgttaatgctgaatgcttaacttgttttttctttttttcctttctcttcacatcctgaagtttcaactaacctttcaatgctttttttccttacctcttttatttgctccatttatgcattaagtggttgcttagatttaaggtaagagattccagggctggatttccattctttgttcttatgtagaatattacatatggggagttaaagagattgttaactcttggccttttaaaacccaataaataattcctcctttttgttttattttttgtcatgcaactttgtggtgtgtcttcatgttccttgagggcagatatttttgtctgttttgttcactgctctatccttgtgcctagaacagtacctgacacacattaggtgcttagtaaatatttgttgaatgaatggttattttgtaatgttaatatattttgtgaaactgaaatgtaagctaccctatcataaaaatgttatgaaatataattagctggatttttataaatatagagactttgttatgaattggagggccaattaatgtactttatttaaccctccccctgtgtaatagcctttttattctataaatggtatgctttctgatataccttatggacaatatgtcattatcttttaatcagtataaagaaattgagaagcagaaaatattcagtgacacgggttttttttttaagttgcagtatcatattttgtagaaaaattattcttttttccaaatagctgtataaagaatatatttcaatataaactgtaagagcttttaaaggtgaatataattatatgcaaaacatcaaaagctcatgataatgtttaacagaatatcagttaagaattagagatatttcctgttagaattcgtttcaataatgttttggtatcgtggaggattcgtgataaaagaaattcaactatattcaagaagcctgcctaaaatacaaggttactacaattatatacaaaacttagcatgcatttcttctttgatttttttttgtaggtgagttttatagtttattttcaaatatatattcctcccatctaatacccattatttgccatatctttagtgtagaaagtgatgacaagatgactgagctctgaatcattaactagtactaactaaggccacacaactttcccctgcccgtggtaggtagatttgattggaagagcccaggcatatggacacctgtattattgattggattgttggttccaaatcctcagtcatggtgagtaagatgtggaattgtgaagaaatccttttgcttgaaataggtgggttgcagtgaactagaccaaaagcagactgtggctgctttggcccttttaccctaaagtctgtattcaaattttgaccattgatgtgttaacctccaaagtgatagaaatacacggaaagtttaattgaagaaaaaatacagaaacacacagattctttacccttaaagtttagactagcttgcccaagctactatctcatgcttgttttctctaagccccagtatgattccttcttgatgttcctgcgtcaggatctgtttccattgtgagagacaggccaaacagagtctcctagaaagatctaatgaagaatcacacttagataagatccctgagctttttggagacctgtggattctagcaagtgtcttagaagtctcctgatgagcaatagcattatggattccttatcctcattttaatcagggtagctgattaaatgttcaaaatttaaaacctatttaagacctagtcgtttttctttctacttctctttttctctttctcagcactttttgagctctgtctttgctgctcccattgctgtcatactttttatacttttcagacagtctccagagaaagtcatcatactttaggaccagacatgtgggatttgactcagaagagacctccttgtttaaaagtttaacttttactattttatacagcatgtttgatgcttaattgttcttgacatctgaaatttggattaactgtttttcttcagtcaagttacaaatttaagagttcataagatttttaaaaacactatggtaatagttttatagcaaaggacgtacaaggtcagtggatagaatgccatattggaggtgttttcatatatacctaaggccatataaaagtggaatgtaccttgaactggttcctgttccatactcttgtttttgtttttgttttttttttttttttttttttttttttttttttgagacagggtctcactctgtcacccaggctggagtgcactggtgtgatcatgactcactgcagctttgactgccctgactcaagtggttctcctgcctcagcttcctgagtagttggtactacatgtgtgcaccaccatgcctggctattttttaacaaattttttgtagagatggggtctcactgtgttggcctggctggtctcgaactcctgtgctcaagccatcctctcacctcggcctcccaaaatgttgggattacagttgtgagccaccgtgcctggccagtactcttttagtagtaaaaagaattttaagaccctgttactgaggtcagtatgatgtgtttgtaatgaatttttctgttgaatgcattaaaattgtcactaatgaagctaaacttaagtatttttaaaataagcatattagtttaatcaaaagtaataaaaacttctgacttttaatgtattatttcagttgaacatcgcccaagcagattcttttttttttttctttttttcttttttttgagaccgagtcttgctccgtcacccaggctggagtgcagtggcacgatcttggctcactgcaacctccgcctcccgggttcaggcgattctccagcctcagcctccctagtagctgggattgcaggtgcctgccaccacgcctggctaatttgtgtacttttagtagagacagggtttcgccatgttggccaggttggtctcaaactcctgaccttgtgatccacccgcctcggcctcccaaagtgttgggattacaggtgtgagccaccgcacccggctcagattctttttttttttttgagacagtcttgccgttgcccaggctggagtgcagtggtgccatcttggctcactgcaggctccacctcccaggtttcacgccattctcctgcctcaacctcctgagtagctgggactacaggcgcccgccacctcgcccagctaattttttgtatttttagtagagacggggtttcaccgtgttagccaggatggtctcgatctcctgatctcgtgatctgcccgcctcggcctcccaaagtgctgggattacaggcgtgagccaccgtgcccggccagattcttaataattaatgagcagggcttaagagttttacagccagcaaattaagaatataatacttttaaaaattttgcttaagatcttgaagatccatcatttagccccatgtttaaaaaatggactgttttcacttgagtactatttttagcaagtatttgtcattccttacagaaatatgataaattccccttatatttctagctttcaggtacagttgaaggtacactcttaaaaatttatccgacacagcacctggaggaaaacctttgtagtaacatcaacctttgagagacccatctgtttttgcctataagttccaaccttaagccatcaattctgttttgacaaaagccagttgttagaatctgttttcaaaatcaagcaggagtttgtccatctttatttctcttgttttcttctgctttctttacctgtttctctttcctcttactcctaatcttatgttcccttattctctgtgttttattgttggactcttgactcgataggcttttttgtcttttaaccctttttctaaaaatcttaacctctgtcctgaatttatactctaattcctggtttcagctttgattttcctcagaggatcttttggtccttttcctggtgtcccttaggaattgaagtaggaacatacatcctctgaagagagggatagaggtctctagaaagccaaataattatgtactagatgggactataatggggaacaaaactggacagagaatgaaggcccaaaggtgactgacctcacttttttcccatcctcactatttcacatacagacacaacctacacacacttcccctcttctatttgtgtgtttaaattctcttttcttttttttaaagagatggggtcttgctctgttgctcaggccagagttcagtggcatgatagctcactgtatccttgggctcaaatgatcctcctgcctcggcctctcaagtagcgggactacagccactcctggctgttttttttttttttttttttttttttggagagacgtggtcttgctgtgttgcccagtctggaatcctgttcttttaaaacttaacaagtttaagaaattattagggaagtttcatagagaaaaaccagctcaggtttttctctatgaaacattccgtaaccttcccacattgatatttctttttttttctatagaatctgtagacattgctttttttttttttttttccacgtggagtctcactctgtcacccaaggtggagtgcagtggcgctatggctcactgcaacccccgcctcctgggttcaagtgattctcccttcctcagacttccaagcagctgggattacaggcatctgccaccatgcccggctaatttttgtatttttagtagagacagggttttgccatgttggccaggctggtctctgaactcctggcctcaggcgatctgcccaccctggcctcccagagtgctgggattacaggcatgagccaccatgcccagccagacattgctttttattttaggcatgtgagtcttatttatttcagaatacctttaaagcagagaaatcattctatagaccgttttgtctccttttttttccccgcaggctcccttccttttttttttttttttttttccccacatgcctttactcttgtacctagagggtctagtaggagattaatatataaggtgtataccacacataacattttaggatgtgtctgccactgttctgtggtagtaggtcatctgttaatgggagatttcatagcagaggtgatgtcttctatgaattagagatacttggctgtccaggcatgatatttgtaatgaatattatatcagtattcaaggaagtattgaatgtaccaaagaaggtagagcaggataggtaggagcattgtagaaaaagtattaagtcacaataattggcttaatgtgtggtgccagttgtagtgatctccaaagcctggtcataaaggaactgcttctacctccggtggtatttgcattccttcatcatagcctattgggaaagtgtttgagctgtggccatgcattaaccttcatcacctaaatgaaatatttcttctgttttggaggtttctgtctggtagggaaaaagtggggacttttccaacttttctttcttgtacctaatacctgcttcacttagctcttgaggtcttttcattttatggaataaaaaaatacataacaaaattatgattggtatcggccaccagagtattgttctaatttcctaaactgctgtgtgtgcctgatgatagttctgctatgtttgtaactttaaaaagtatttcaagtgaaattactattatgaagtggctgcagtattgctttgttttccttgtcttgagtttatggtatatgttctgtctctctctctgtcgctgtcgttaagttcctctccatcagcacatagagatctcatgttttgctacttgtcaggaaatgttttctctcttaaatacttccctcaaaatagtttttttaggatcaatcatgatggctgtctagtaaatatatttttatatttaccagattattttagttctgaaatatagtttaactttaattataatatagattttacctattataaaaattgttttgtttggcatttatttctgttcttccttttcttcaaatttgatggcagtatttatattctgcatagcatatttattgttttacttagcgtagaaacatttttcacacgggaaaagctgccttgaggaaatattgaaaaactcttttaatagaaaggtaatgaaatattaggtataaaattagattgtttggacattctacagagactcttgtttcttaagtgacttatgttagtcatccaatcccattaaccaaacaaatatacagtcatttgatgattctacagatcataaaatgtaccaagttatattcatagaaatgttggccaggcatggtggctcatgcctgtaatcccagcgctttgggaggccaaggtgggtggatcacctgaggtcaggagttcgagactagcctggccaacatgacgaaaccccatctctactaaaaatacaaaaagtagctgggcgtggtggtgcgcctgtaatcccagctactcgggaggctgagtcaggagaattgcttgaacccaggaggtggaggttgtagtgagccgagatcaggccattgcactccagcctgggtgacagagcgagactctgtcttaaaaaataataataataataataaatgtccaccagattttaatatatagattgtttattttatgctattttttttggtggggggcgggtaggtccaaagacttacagaagatactgcaatttaaacaaaaacaccttgcataccaaaacttaaaacaaatataagctggaaagctcttttcaaatattttagctatcccatgtatagaataaaattctctcttaaattcctgctccttttccttcctgtttctcagcaaattgatgtagttttagtgtttggttcacttctccctcatcacttaaagtaactttgggttttatgttgtttaaggttgagcttaaaggactttggttaccactttaaaaaaatcttctggtttcagaaattaagatatgcagttttaaaagctattcattatttgtcatattactcctaaaattttccccaaatgtggattgatttttttaaaaaaactttttctggcattttcattttaagatacaagtagtataccctccgcttattaatgagagggagagcaaggataagttaatctttactcttacttgataatgtttgtttttattgtttaaaagcaacaacaaaaggattacagataaatgcttcactttaaaatattgacatttcaaaggtatcatttgtcattaaagattgttttaacatcacacacaacttgttcactgggctattcatttgaagaatttgtttcttgagatagtatttcttgcctattcaaataacaggtagtattttaggattttaaaaaattccacttaagccagggttggttttgatagcctcacttctctgtatacaattatgatttgctttcttaaaatttatattctgaagttacagttataaatgtattctgatttcaatggtatgatgtcttgcaattttatttagaaagtataatttgactactctagccatattatttttagaaaagttgaggtcctttttcaaaatatgttttgaagatggaaattcaaaatattagggtcttaaaatagaatcacatatgaacctgtgtggtgaacattaacccattggtagtctcaacttgagactgcatttgaactacacttgtgagtgatttttcttagctttttgagatagccagggctttctgtataagtgctaacatactcctttggtgacctccattattcccagattatgcatctttcctacacttgcattttcagttggggatagaatagtgagtggagttacggtccagctctgacttaggactatgttacatctttctcatgcctgaattcaccttcagtttgggcccaagtgggtccaattcccattggaactaggacattgcctgtggcccttgtgctgctcccagttgaatgggatacctcagccctaactttctggttcagatgtttaggaacatggcttgaacttctagcagttttcaggtaggtggttccctcataagaagatactaactaaatctgacttataaggctggcccacaatttaaaaaactaaaattttctgtatatattacatgatttatctttatattctctagttacagtggatcatatgcatagttgcatatttttatttgggaaatgtattttgcttatgatatgcttactatctaaagaaagttactggccgggtgcagtggctcacgcctgtaatcctagcactttgggaggccgaggctggtggattgcctaagctcaggagtttgagatcagcctgggcaacacggtgaaaccctgtctctactaaaatacaaaaaattagctggtcgtggtggcatgcacctgtagtaccagctacttgggaggctgaggcaggagaattgcttgaacctgggaggcagaggttgcagtgtgccaagatcgtgcccctgcactccagcctgggtaacaaagcgagactctgtctcagaaaaaaaaaaagaaagttatctctaaaaataaggaattgcttaaaagcattattgtttttgattgagttactctttattaaaactaaaattttgtagttattctatttaattttaattgaatgtaatatcaaataatctaaccagtgatctgttggtgtgatggcctaatggcaaataaagtctttgcatacaagtttataatgatttgaaaatctcatgttaggaagagtcctttgagtacaactgtagagtaatagtagagtagagattgcatatgaaatgcatggcctctaatttttttccctttatttaaaccttcccctcctttgttatgtagtgtagcatattatttcccaaaagtgccactttatttcactgcatacaagttgagttttccttaaaattttttaggtgagtacccagaacatgaagatgggtgggctgccgcgtacaacacctccaactcagaagccccctagtccccctatgtcagggaaagggacacttgggtgagtatataagtagtaattgaaaaccatttcatgtagtattgtttaaaaatgaagcacaacatatttaaattattttttgaatatttgaagagagaacattttctttgtaggattgttgtttgtgtgtataacttcctcttctcttgggaaacacatttttatacttcagaaagatttgtttagaaattgtttttctagtgaattttaaatttgaggtaaaatcctagcccaagttcatagtttattgtaaattgcagtctaattttaattccttttctttcagaaaatgtatatagtcttttatattacagtttaactccaactatcctttttaagctgtgtagattataaaattctataaaacttataagaatattgagcttcaggccaggtgtgttggctcatgcctgtaattcccaaagtggggattttgagagaccaaagcgggcagatcacttgagcccaggagtttaagaccagcctgggcaacatggtgaaaccctgtctctacgaaaaatacaaaaataagctgggtgtggtggcatgcacctgtagtcccagctacttgcgaggctgagacaggaggatcacctgagcccaggaggttgaggctgcagtgagccgtgatcatgccactgtgctgcagcctcagtggcagagtgagcccctgtctcaaaaaaaaaaaaaaaaaagaagaatatggagctttattttggtcctagagttgggctctagatttgacttttggcaaaaatggccaattaatggaaaagcttgacttttttcttctagagcatcgtattataaacttgacttactgtgattgagatttacgattaggttggcattagtatagcccagaagccaggtgattaaaattctgtttcagctgtgctgttactttataattcctacatagtcagctgccaagaattcagttttttcatctgtaaaaggggggtaatatttgtcctctataaatttttcaaggtcactgtaccacaaattggatttttaaaaatgtgtaagacaaagacaaaatgttttgacaaccattggctttatgatatatgctaaacaagtttttaattgacagtcttgtttttggcttcctcagcaccaccaccatcaccaccaccaccaccaccaccaccaccaccaccaccaccaacaacaacaacaacaacaacaacaacaaaacaaccacaaaccttcaaaaaaccgaaacccaatcaagcactgaatcaggataggaccaaatgatttgagatgtagtggaggatagtgctggaagagagataataggacagtaggagaccaaagaataaaaataaattccaaccaggaataggatgactttattaggagtggacaaaataattctgcttagagagagagaaaatctagtggatcaaacaagatttaaacttcaaggtagaatgtagatggcatagtagtgtataatggtgccaggggtcggggtagagagatgaagaggaactctgtttttattttcctatgtaaacatttacatttatatcatgtgtagtgccttatggattttgttgggttttaagtcaagattgttagtaagataagctacttagtccccagaaagtccctagaagaatgaaactttgtgttgttttcaagttttgaagatttgctcatataccaatgtttgttttccttgtatattagcaatggttctgcaagatccttggggaccagagttgctgaggcccactctgctagttgatggctataacctgtttttccacatagtctttgcctagtcaccacattttgttcctttgctccttttttttttaaaaaaaatcttatttgtgtcattgccttcactctgtagttctcaattatcaaataatttttacttggatgcaacagaacttatttttttgagacagagtctcactggagtgcggttgtacaatattggctcactgcaacctctgccttctgtgcccaggcaattctcttgcctccaggcgattctcctgcttcagcctcctgagtagctgggattacaggtgtgcgccaccattcccagctaatttttgtatttttagtagagatggggttttgccatgttggccaggctggtctcaaactcctgagctcaagtgctctgcctgccccggcctcccgaagtgctgggattacaggcatgagccactgcacccggctgcaacaaaacatttttattgcctgggaaaaattgtctgaaaattagatgttggagaaattaatgtttcccattttattgtttaatatttgcattataatttaagagatgctggaacttccttttagtattttaaatccaaagtcctgacattactttttcctcttttgacccaagatttcatccagtgtcccttattttatttttaattaccaatgtatgtatttatgtaaggagactttgaagggtagtagagtaaattgcaaagtgatctcatgcaaaatcagtgatccataacttgagtgccccaggaaagcaatagttaaaggaactctgggatccatacataagtcagtagagcaacatcatttcaggaaaagaaaggtttttaattttcacatcttgatcagttcttattcttttagtgaccaagatctcatctacaatatgtcaattgactgtttatcattgtcataaagaatttggaaacctaagtagaaatgagaactaatttaataaacactaatttccccatgtgcatcctgttccctgtcatatttcctttcttcctcttttcatcctctttacgaggaaattttgggaaaaggcgggaaatatgtgttaataaaatccagtctggtttgtattttacagttcaaagtaaataatatagaaaggctgttgtggtggtcattcccttccccccacctttgtaaatgttgaactctgaggaaggaaagagaaaagagatcaaggtgaaagttgagggagaaagtgagaacggaagatgagattaaagtgtgtatttttgtatatagatatactttaatttctgtatatttggtatatagaaagggaaatgagttgttatggctagtattgatcatcagtgtgggggttatagatcctaaatctagatttgtagttcctgtctttgaatatctttggttagggagagaagggagaggagaataattagtgcattcatgaagtacagttgggagactttaatatgatactaaaagaattccaactcttctaagaagaggtagggtctgggaaacattggcttaaatggtagagaacctttgtgctctttgagaataaatgaacaaaattgcattagcacagggaaatgaggttggagactgaaaaataacaatattcaccaaaaccctaatggtggagaagtgatacattagtaaagactgaaattggtagctgggttatgttaaaacacatttcctatctctgattacaaattgtatctcaactgctggcaactctttgaatttattgtgccgaaacttgcttaatcatacaatacatacgctcttctttttgtaggcggcactccccctatcgcacactggagccagtgcgtcctccagtggtaccaaatgattacgtacctagcccaacccgtaatatggctccctcgcagcagagccctgtgaggacagcttctgtgaatcaaagaaatcgaacttacaggtattttctctacctcagtgcaaaatgtgatggtcatagtaccataatctgttcagattacttcaggtaaatctctcattttccaagcactaagttcttttcctcactctattctcccaaacctcatctgatttcacctctctctcctcatgttctgattcaactttgagcagtcaggaagttgataaagaacagacatctcaaagtgcagacttctctccaagttttaagagttcagttgatctggaaaaaaaattatggaccaaatgtgggaaatgtcaggttgttttttggtggaactttacagatgaaaaactatacataataaaacattaatatgggatagtacatcagagtatgattattaattaaaattactcaaatctgtttaggaaaatgtttttgttttattataaaagaagtttcttcagataggcattaaactggaatataaaaaggcaatatttattgttttaatgtgttaaacctcaacatttatcacttgtatttatggataattttttcaaaatgtggtcaaaacaagcttattgaactcagttttcccctcaactttattaataagtaaatatatatatatatatacacacacacacacacacacacacacacacacacacatttttttttaacctgtcactgacttggagctcaaggaaattttattttgaagtggtacgcttttgaattacctttattgtagctacattcatctcagaaaatgtcgggaagtgctgatgatctcttactgtttataaatactcatgttttggtggctcttatttctttagcagcagtgggagtagtggagggagccacccaagtagtcggagcagcagtcgagagaacagtggaagtggtagtgtgggggttcctattgctgttcctactccatctcctcccagtgtctttccaggtaaaacattcatggtgcctcgtcttcacttttcctttctgaatttgattcaatttgtgatttaattatggtgggctttcttcgtaatcaggattttttttctttaggaatcataaatattgggaagtctatatatttgttatttgtaagcaagtgatttgtaagtgtttgctcactttgcacttctctttatgcctttggtgatgtggctcagttgctgctttgaggtttcagatcacactttgttatgagtacaagtttaattccagctagtgttatgacagtgcagtctttggacacagtgggaactcagtgtgagaaccatattagtaacaaaggattgggcagatataaaaagtagttttgacagttaaatttagtggctgtattggaatttagtagtctctgaaaatactaccctcttttctctgaaacagaaaaatctgcttatttgattcgaggagatacacacttaaaacttagttttgaaaacgtgacacaaaatacattaatagaatgttacatacttaatttacttatagtaacaagtagataatgccttttaaaaatcataaagatttgtgttttaaaaaaaatttttaatctgataatatggaatatgtctattttctgatttgtgtaattcaaaatggaaaactgttgttttttagtgtattatgttagttttgtatactatatacagaatgttatgctaaaaataacaatacgaagggaacacttttcttctggagtagtgctttcaattgaaaaggaatgtttgtttttaatgaattgaaaaaatctgcacattaccctgagcatcttgaattatttgctgcttatatagtaatcctttagcataagttttattctttttttcaactctgttcttttggttagtgttaagcactgaatatctaacattaaatactctaataccttttctaatcctgcctcatgtgattgcctcattaatgctgcctcttactcctctttcccctcagcccctgctggctctgctggcactcctccccttcctgctacttctgcatctgcccctgctcctcttgttcctgctactgtcccttcctccactgccccagacgctgctgctgggggtgcccagacccttgctgatggcttcacttctccaactccccctgttgtttcttccactccccctacaggtaagtatttgcttattcattggcaggcagatgcagtcatctggctattctcttacttgcacctctgatttttgtttgtttttggttttgttgtacttcgtattaaaaaaaaataagaataatgtactaaccagaaagtatgtgaccaaagattagcatttcctgagaaaattgaggtaaagtttctcatacatttttccaatagggtagcataaatttgtgtttttttattgcttgaatttcatttattagagatttttaagtttaatatggagctaccttctatacagtttttggaaattatcattagaaatattttcattataggttaagtgattaacaaaagtctattacaataattctaaggtatattttataggaaatatttgatacaacaaatggaaagcctctgtaagtctatttttaacagaatctgttgcttattatagcagcattggaaactcatagacaatggacttttaaagaatttcaggtttatttaagttggctggtgttttaaaattgcaatctaaaatctgttttgattggggaggagatagactcaattgctacgaaatatatttgtagagttaatgatgctggctagtaacaggttcttgtctgctataaaatgtatgtgtttggacatatatcactgtattagtctgttctcacattgctataaatacctgagactgggtaatttatgcagaaaagaggtttaattggctaacggttcttcaggctgtacaggaagcatgatagtggcatctgcttggcttctggggaggcctcaggaaacttacactcatggcctaaggcagaggggaagcacactggtcacgtggccagagtaggagcaagaggacaaggcgggaggtgctacacacttttaaacaaccagatctcattattgcaagaacagctccaagggggatggtgttaaaccatgagaaaccgcccttgtgatccagtcacctccccctaggccccacctccaacattggggattacaattcaacatgagatttgggcagggacacagattcaaagcatatcaatcaccgtagtgttccacttgccagtgaagaacttcatggcatttatattcagctttgctgttatacatgttaaacatatataagatctttacatgttttaaaagacacttttagccaaaatggattttgggtgatgtcttgtgggattccttctatatgacttttaaagaaaagctttctgcagtagataaatgtaaacatggggtgttttttgatccagatacaactgttaggccaaactaactagttaaatataggaatctcgttatgctcctgctttgataaagaatgcatcagaaaggacaaatcacccccaactgagagtctatgttttagtaattaaatattaattgaataacaggtgcctggctcagtgttcactaaataaacatttgttatgtgaggggataattaactgtggtttttaaaacaaaaagcaaggtaaatgtcttattaataatttatatcaggatagtctgttttatacagtacctgagttaccaagcaattgtttttctttttaccaaggtataacttatgtacagtaaaattcaccctttataccatatatgtttgtgagttttggcaaaggtgtactgacatgtaattgccaccacaatcaagttacagaacagtcctatcatcgcaaaaatttcctccatgccccctttatagtcagtccttcccttccactcccagctcctggtaagcccttgatgtgttttttttctctaaagttgtgcctttttaagtataacataaatgaaagcatatagtatgtagcttttttgatctgttttttttggccagatgcatttgagaattacccatgttgttgcatgtttaagtatttcattacattttattgcttagtagtgttgtattgtatggggatgtaccacaatttgtttatccctttctcagaggacatttagatttttctagttttgagtgcttatgaataaagttgctataaacatgtacatacagggttttttttgtgcacatgggtttttatatcaggtaaatacctagggaatagaattgctgggttatattgtaagtaaatttttaacgtcataagaaactgccaagttgttttccaaaatggctgtataattttacactcccagcagcaatgtgtgagtttccagttgcatccttgtcagcccttggtgttgccttttttagctttagccattccaatacatgtgtaatggtttctcattacatgtgtggtttggatttgcattttcttaatgactaatgatattgaacatttttttcatgtgcttatttgccatgtgtatatcctctttggtgaagtatctgttcaaatgttttgttccttctcacctttttaatagggtttttttccttatcattgagttcttttatattctaaatatatgtcctttatagattatgagttacaaatattttcttccattttgtgattcgtttgcttattttctatttttttggcggggggaggaggggcgggcggacagagtttcactcttggtgtccaggctggagtgcaatggcaggatctcagctcactgcaatctccgcctcgcgggttcaagcgattctcctgcccagcctcccaaatagctgggattacaggcacccaccaccatgcccagctaatttttgtatttttagtagagacggggtttcaccacgttggccaggttggtcttgaactcctgacctcaggtgatccgcccgcctcagcctcccaaagtgctgggattacaggcgtgagccactgggtccagcctgttcatttatttttttgatgttgtatttcaaatagcagaaattcttcatttttattaagtgttatttttcaaaatttttttaaatgaatcgtgctttgatggcatatctaagaactctttacctgaagtcataaagattttgttctgtgttttcttctagaagtttttagtttcaggttttatcgctaggtttatgataattaggtatatatatttttaaaaccccaaatggtaaatcgactcattaatagtgtgaatagtgtcttttttttttttttttttttttttttttgagacagagtctcactctgtcacccaggctggaatacagtggcaatctcggcccactgcaatctccgctgcctggattcaagtgattctcctgccgtagcctcctgaggagctgggattacaagtgtgagccaccacacccagctaattttttgtatttttaatggagacaaagtttcaccgtgttggtcaggctggtcttgaactcctgatctgaaatgatccacccgcctccacctcccatagtactgtgattaaaggcctgagccaccatgcccagcccatgtgaggttttagactagatctaactatataaaattcataatgatgttaatccagatgtttttaacttgatcgtaggtttgtattagtttgctatagattaattactgaaatgctaattgtattcagtggttcaaataactaaatatgccttttaaatcatagtttatatgttttcatttttatcatggttacagaggcttctcagttgatagtggattatgtttaagcttgagtgcttaagtttttgatacacatgtaagatgtttaaatgttataacaagccttgagtgctcttataatccttatatgactccatatgaatctaagcttggtaaactttcagctcctgtagaacaattttagtcatataaaaccattttataatcatagacaagatgaaaaattgtcaaagtgttgttttcctctaatacttttaattaaaattaccaagaagatagtctcatattaaggtagaataaagatggtaagactcagctgagaaatatgaagcctggaagaggatatgactgcagtgtttgatcatgaagatttcaacaaatcaagcattcatcaaattccatattacataagtcttatctcactgtgtttcaagtagtttattttagaatttaaaaaatttcaggataaccttaggcacaaatggatagatgagtgtgccaggtatcatctgttcctccagtcccccctcctctactctcccctcttctccagtaggctgacctccatgaaatgtttcagtggattcttttgccctctggcttcctgttgggtttagcaaaagtgttttttttttccttttcacttatctcctccttttctccctttctctttctcctttcctttcccctctgctatcctcttgccctcctccaccttcatctcctcctcctctaccttcctgtcccctttccgctttcttctccacctgcttatttctccgcctcctcttctctcttgccctccccttctcccttgtctgctattgtgctctctcatgggtgctgtggtgctctgtctgtaagaaaaagttctcagcttaatgtaggtgggagtgcagtcaaggtaaagtttagggagtggattatattattaggaaactgatggattatggaatcatgtctccagttgacattagctgtggaagaactctcaagagagcaaaatacagtgaaattgatgataactatatatggacttagggatgatattaaaaataagatatattttgaccctctttttatatcttaatttttttcatgattgtaaattttttagattttaattttaagacaaagtaatgtagctttcgtggtagatttttttgattaaaagaaagaaatgtttgatttggaattacgtcatttaaccttttgttgaaatacttcattttcctttaaccatacttttttgctaccttacgtttattattatttattattttggaataagactgtgtgtcaaacattttttctcttgctttcccaaacatcattcttgtcgattttagttttcagtgttcagtggctgtattttgggggtggagtagataaattttaattaattgtgatgattttgaaaccccatcagatttttaatttagtgaaataatagtgttaagtagcaaactatttatttattttgagacagagtctcactctgtcacccaggctggagtgcagtggtgcaatcttggctcactacaacctctgcctcctgagttcaagtgattcttacgcctcagcctcccgagtagctggaattacaggcgcacgccaccatacctggctaatttttgtgtttttagttgaaacggggtttcaccacgttggccaggctggtctgaaactcctgacctcaagtgatctgcctgccttggcctcccaaagtgctgggattacaggcatgagtcactgcacccggccctaattagtaaactatttagacataactttccaaacttaatcatatttttgtttgcttttctgcttttgtactctgatataatatcagcgaacaataactcaccttgcattgtatatttcagataccagttaaactagctgttatttttaattcttaagatttaggcattgtacataaagtatttaatgatctgagataattttcttttaatgacatatgtatgttctatctctttttcaggtcatcctgtacagttctacagcatgaataggcctgcctctcgccatactcccccaacaatagggggctcgttgccctatagacgccctccttccattacttcacaaacaagccttcagaatcagatgaatggaggacctttttatagccagaatccaggttagtttttttgtttttttgcattctatagaatgtatttaattaaaaaccttcaactacaaaaaacccttaattacaaatagtgcatggtaggtggttagcaccatttgttgaatgaatgggagaatgaatgaattgtaggttgttaatactgtatctttcaattctttaaaaaaaaatcagtatgtgatttccacgtaaagtcatacaacttagtttttctgagcagaatttttttgaatattttagtggttatttgctttttaaaataacattgtggtgaatggtatttcctttttatttaatcagacatccttacttttaaataacaaataatgaaagttgtgtgcacatgaacagaatttagaagtggcaaaggaaaagagaacatttttgaagctactttgtgctagggaattatactagcttatacaattctcataccaaacccatggtggaaaaactaggaattgggtaaattgaatcagatataataattacactaaataatcggttgtatcatgcatgcagaataactaatctggaacatatttaataattattattttgtttactccccagagagggcaagaacaaatattagacaccatggctattgtggacatggtatgtcaacttactgcttttttctgtatttttgccaggaagccagtaagcctatgtgtgaacacctctcatactgggttcaactcattccatttttgataagccttgaattttatggagctgcagtttgtctctgtggctgtgacctatagtgatattctttgaaagagtcttgcagaagaaatttgatcctccaacataaacacttaatttaaataatgtttttatattatctcatttgattcttagaatcacgtacaaaataagattggtgatcattttcttatatcttataggtaaggaaaatgaggctgaggtgatggtcaggttaggatttgaacttaggttttctgactctaagttccatgttctttctttctgttttttttttttttttttttttaaattgagatggagtctcgctctgttgcccaggatggagtgcagtggtgtgatctctgatcactgcaatgcctgcctcctgggttcaagagattctcctgcctcagcctcctgagtagctgggattacaggcacccacgaccacacccagctaatatttgtattttattgtagagacagggtttcactatgttggccaggctggtcttaaactcctgaccttaagtgattcacccacctcagcctcccaaagtgctgggattacaggcgtgagtcaccgtgcctggcctaagttccatgttctttctattgtcctacctacatatttaaaaaatttttctcttatcctcccaagtcttctcttttttggaggggaaggcggatgaaaagatgtgatataaagtgcatgaaagcctgagaccttgtcagtcttttatacagttacatcctggaatattgctcaggaactgtttgttgaatgccaaatgaatcccttgttcatttttccaaatcccttcactgttctgggtccctctcgtaaattaagtgctgtatctgtagtccatccagtgcaaaccatagtgtgaataccaactgccttaattgatatatacttcccttctatcttttatcacgtttagtgtttttggctatgccattctttttaaatcattctgaacttaaattttgacaaaactgccctttttatacatttgccttttaaaccatgttttcaaactcacatttgttcaggagcacgggattacaggtacctgccaccacgcctggctaatttttgttttgttttgttttgagacaaagtcttgctctgtcacccaggctggagtgcagtggtacaatctcggctcactgcaacctctacctcccgggttcaagcgattctcctgcctcagcctcccaagtagcagggattacaggcacctgccactacacccagctaatttttgtatttttagtagagacagggtttcaccatatcggccaagctggtcttgaactcctgacctcaagtcatccacttgccttggcctcccaaagtgctcagattacaggtgtgagccaccgcacccggcctatacagggatatttcatgctttgttcgtgtatgctccaaaatagtcctatgagaactctgtaggtagaatttatttgaaggctgtttaagcacatatttaaatgcattttataatacatacttcaatagtttctttgtaaatctgattttcaaatgcttgaaagtatatgttaaagtaaaaagatccccactttatggaatgattttaatgaaaagtatttttctcactcatggaagtaaggtgaattgggattgttaggctttctgtgtaatgtgtgagtcaatttagttgtgcttttttgtttttctgtactctgctctattaagttctgcctttcatctccagggatttgataactgtttaaagtgggtggccacagcattgttagttggttaatcagagtactttttgtaaactaatttttttttaactaaaccattttcttggaaaagctctttttgcaagacttaatgatttgtgaatcagtgttctaaggctgttagatgtacttttattttatattcattagaatattatttatgagtcaagcactgtggcaggtgcctgcagtcccagctcctcaggaggctgaggcagaacgattggttgaacctaggagatggaagtttcagtgagccgagattgtgccactgtactccagcctgggcaacagagtgagaccctgtctcaaaaaaaaaaaattatgtaagtctcctgtattactcccagtagccctgcaattgtccctatttttttcatatttacaatgagaatatttgttgtgctttctcaagtaactaattctctgatttaacaaaaatgatctgaagtgtgtgttttatgagctttttttttgggggggtaattggagtcttgctgtggttgcatgcttctgaggaagtgagctgacaatctttggaaggtttcatgtgaatataaattcagtggggttctgtgaggtgtaaatctagcagtgctgttactatatttgttaatgtacaatttgatctgagtttgaaaaagggcaattataacataggagttaaaatatggaacacccagtgtctagtgccaagtcttaggagcacaataattgtttttttcatgagattatttcagaaacaagttattgaaaggaaaggaaccctttgatcagggcataactgaaatccctttggttctcattatttcttaatctaatccagccaatgaaataggaataccaatttatcattaatcttgccagtggtaaggagggggtcatagaaacacatagggctaattatgagttaacagtctctactttaaatgtaaatatgaaacaccttggtggtcaagaagaatatacatatatctacatgtgagtatgtgtacatatacttacataagccttgtttgttaaggaatcagtaatgtagcatgtaagtattgaagactttaggagaaagtagcctgtattttactgctcatattttcttaaaagcttttgaaaaaatctagttcataaagtgaatgttggttccaagagatgtgtctatatatagttctatgagatataggagtttctgaatgggtatgctgtttcacaaagagaaagtgtcaggcttagtaacccctgaatggttttaaaagcgactaaaaaaataggaaacaatgttgggatggtgctgttccaaaataaaaagccatttcacatattctctaaatgatttgtgaagttacagcatcaccataaatgtctaaaacgtctagaagaatactgatgtgttggggctttagcaaagtataaataaagagcaggagcaggaagatttttttttctccccaaagtcttgctttgttgtccaggctggagtgcagtggcacaatcttggctcactgcaacctctgcctcctgggttcaagcgattctcctgcctcagcctcccgagtagttggaactacaggtgtgtgccaccacgcctggctctttttttttctttaatagagacaagctttcaccgggttggccaggctgatctccgactcctgacctcaagtgatccagttccatctggcgtaacaaaggtcatcccaaattctacttttctccacggcaaacctttaacaaggtggtcgaaattaattcagataccacatccttttctttttggaccatgtaagatctcatctgactagaatgtctgtgagccagaatatactgtctttcttggagttgagctgaaaacaaaccattctaagagaatttaagcagaattttgagcaaagaattgttgcaatattcagttctaatcctagtcattttgttactgctttggcctcccaaagtgctgggattacaggtgtgagccaccgcatccagcctgaattcacttttacataccttttgttctaagttggtattcatgtttagaaaatactacacttacacattgtttatttccttcactgggaaaaaaacataagcatctcaactcgcatgggctatataatatatatatctcctctaaatgtgatgttcagtaatgactttagaagtagtttttagagcgcttattttgtctaatattctcagagtatttataaagctgtaaaaataagatgtaaaagcttaattttatttttccaaactttttgaattggacatctaaaatacaagcttcattgatgcttcagaggactttataaataaccaggaaggttgtacttggaaagtctgtacatttcatcagcacagattcatcatttaggtttggattgcttggaaagccttttactgtttatatctaaacattcttgtatattgtgaaaattacataacaatctaagtttggagatcttttggtggttattgggaaagagtcttgtcttatgaggaatcattttagctaaatgaaatgaaaacaagtttgcttcctgctcttctttgcctgttcacaaaatgactaggattagaactgaatattgcaacaattctttcctcaaaattctgcttaaattcacttaaaatggtttgttttcagctcaactccaagaaagacagtatattctggctcacagacgttcttgtcagatgaaatcttacaaggtccgaaaagaaaatgatgtggtatctgaattaatttcgaccaccttattaaaggtttgtcctggagaaaagtagaatttgggatgacctttgtaaccccagacggaactgaatttttgaacatgccttagactagctttgaaaaaagtctaacttgttaccaagtcattcttttaaggaagaactgcgattgatctttccctggctgctggtggacttttttttttttttgagatggagttttgctcttgttgcccaggctggagtgcaatggcatgatctcggctcactgcagcctctacctcctgggttcaagcgattctcctggttcagcctcccgagtagctggggttacaggcacctgctaccacacctggctaatttttgtatttttagtagagatggggtttcaccatgttggccaggctggtcttgaactcctgacctcaggtgatgcgcccccctcggccttccaaagtgatgggattacaggcatgagccaccgtgcctggctgctggtgtacttcttaaaaccactatggcttcagattttcactttcagaagtagaaaagaaataagcatattcatcttaaaaaaaaaaacctcagtctacccacaaaaagactgctgtaggttaagcacctaatcattcttttttagctgagtaccaaaaggtcattttttatatttggtagagaaacagtgactgaagtgggaaatttcccacttttctgttacacggaaggttaggttacatgccaacagaagaggagcatttcatcttggatgtgaacatgtgccttgtctctactcttctagtgccagttgctgcctgctactgtttctcagttttatcttttttgtctatgctaccttctcctttcttttttttttttttttgagacggagtctcgctctgtcgcccaggtcggactgcggactgcagtggcgcaatctcggctcactgcaagctccgcttcccgggttcacgccattctcctgcctcagcctcccgagtagctgggactacaggcgcccgccaccgcgcccggctaattttttgtattcttagtagagacggggtttcaccttgttagccaggatggtctcgatctcctgacctcatgatccacccgcctcggcctcccaaagtgctgggattacaggcgtgagccaccgcgcccggcccaactaccttctcttttcactgtcttctgcttacccttggaaacagtattatgaacatatcaacagttgttgtaagcctctgagtgggaagcagacacgcaagtcaaggatttactgccaagaattatgactttagggaaaaacctaaccaaaggtgtctttttaagaaaggtaccaatttctagggttatactgctctgttctttgcatctagatattcaagattatctgcttaactcttgtctgtgcatttatatgtcctccctgcatctatccatagcatcaactgtagatattttgcataatctcaacccaaatatatcatatcattatctctccctgacttacctgtttaccatcccatttctttcccagtactacctaccaggcttaacatagttagtgacatctccatcttcatagttacgaagggtaaaaatctaagaatgaccttcagcttgttgctgtccttgatatgctagctaaatcattaattgccaactactctcttcccacacttttaaagttctctccttttctagaaactgctttgatttattacgtgccagccactgggttaggctttccacatccattgtctttttttaatctttgcagccactattggaagtaggttgcattaccttgttttcatatcacatttatggaataggcctgaagaagttaattgactagctatccaaacagccaggaaatgatggatcagagatttgaggctgagtgacctgaaaatccaacctctttccactaagcactcttccaccaggcatataagatccttccctatttcatatcctcccattgatatttctgggttttttactttctctttgggtatcttttcctagccatatggaaacatttctggtcctgtgaactggttatgctgttttatgcctctgagcctttaccctcacttgcttctctcaacttgattatctttctcaacccctgtcagcttggcaggttcccttcttcaagtccctgctgagaggtcatttcattgtagccctccttacctccaccactacttccagggaattgctacaaatattgttgggttaagattatcatgtattcttctgtttcaatagaatgtgatctccttgagagcagagacatgttcatctttttagttttattagtcttaactgtattttggagctaacagaggcattttctctttataagaaaatgcatatcctactttgtacccattctaaaggaaactgtaactgtagagtaatcttttttctttcttttttttgccgctttagtttccacacatacctggcttattagtgcaattatatatgttaaacatctgttgacagtttattagttctaggcactgtgccaggtgattgaggtgcagggaaatacaccttgggaaggagagtggaatgatttgattaaggcctgcacttttctataccatcagggaggaagtgtaccaatgagttgggattatgaaaaattgtaatgacatagcacccgattctcagaggacggttttgatactgttttcctagcaggtgtttgccacttacttagtatgaagtcagtaagtatttgtctaattaatgaatgaagaaccagtttacttgcctacaattagagtaataaaagtatccatttagagtgttgggatgtaatatttttttctctctgtattgacaaacatttaaacttgtaaccttccaaggtaaaattcagaaaacaacatcatggtaatctgcagaaatgctttccttgagaaggcatgatgttaatgatatgaaaaaagatcaattatatataatatatatataaaacatgattgttatatataaaaatgggattatgttttatatatataaaacatacgattatgttatatatatatttaacatatctgtgtatgataaatgcctcctgttgtgattttcaaaaacttactaaaaattcccccagtactttgtttgtgttaatgagttgtccctcaacaggggatccttgagatcactgataaaatgtttgtgaatagtagtttccctcctttatgtgtttattttattgtattatcctttccttttaatgtaactcgcccttatcccttatcctccacaccttttttgtttttgcagtatctcttgctcctcctcctccctccatcctacaggtaactcctcagttacctttaatgggatttgtggccagagtccaagaaaatagtaagtttatgtcttctttatgctgtagatcagattgtaggcataaaatgtcatttatatgtgattgactggatagtcattcatttgctgatacttcaacatttcaatattatgaacaaatcactgtctggctagtggagataaaatagagaaattttctacttttaaataactaatagtaaagacataagacaaatacatataaaataaggcacatataagaaaagaaagatcacatcctactgaggaggtatctttaatcactagatatcccatctttttctctgggttgctcagataagtggtagtctagtttcttatcactggagttttatgggtattataggtggtctgagaatcttcctccagttttgtgattccagatatcagaagggccttttatggtagggctcagaggaccaggctgccagtctgtctcccaagaagcctcataggttggcaatgaatttcccttggcctgttcaggtaactaattttgttcataccttgagtcttctagggaagcattaagggagctcaggaggctgatgacaaatcaggaggcctgtatcaacattcagtgaggaattgctgtcacagagaccagtgaacatagactgtatgatggacaaatcctcttcttatgggcagtctttgcgagggccacatcacaataataaggttacatgatttgcatgaatctgaactaggagaatgatattaaagatctcatgtcatcagaccaaagtagtccagtgtatatatctcataacaaggatggatgacttcactggtggggtagaaatatttgcaatctgtggcttaggactcctgcttatttggaaatgggcactgccagtactagaatgtaagctctataagagcaaggagttttgcctgttttgcttgctagctgtttccccagcacttggaaaagcatctgacacatagcaggcacttttggtccctgcttttttctgcttctgtagctgaccaaatgccccccttttatcagcacattcttctagatgtggttgtattttaactaataattcagtcttactggcctaagggctcagtgtctttcagctgcctttgcatctctatttgctaatttctgaaaatagtctattttacttacttttgtttattggaaggtactccatgaacacctgtaatgtttaccacaccgtgacttcataagatgttttgttgagtttaagagctattttcacatataattaggttgatttcatatgttttaaattatgctattggggccgactcttctttagcttgggtgtgacccacactggctcgaggagaaaactgcctctcagcaacattcaactattaatagttcagcatgtgccaagcacatccatagtgtgatcctctgccaggcttgtgaggtcaagtgtgggatacagggtcactgttgccaggttttaaaaaatgtctgctgcatccaaacaggataaataccaagtagaaaaggatttaattacagtacgagaattgaaggactttccaatgctggttccattctacatactccatacaaggtggaaagtctaagtaaatgtcattacagtaaaataatttttttccatcacaaatccggtttaatcacaatgattaatgatggtagtcacttgaataataccctgggagttttttctgtttttactattgtgatgagtgtacaccttagagaattctgccaatcaattgctactgcatgttctgtgagatgttgtcattcattttgaacaaaagtggttctgagcagcttctggagtaaaggccagattttgaaactgacattgaagactaatccattaatgaaacacgaatgtttgtatagcaactaagtggttattttcttagcaaaaaatgagacttgaaagttgaataggatttaaagcaggatgtcattggttttcgccagtcaccagtgaaagctgcaagctttgtagaaacagcaaaatgtttcatgaaccaaacctaagaagtattgttttaatttaatagtaaagtgcatgactatcactttaagacttaggaatgtcttaagtagatgactgcaaaacattattatagcagcactacctatattttaaaaagtcattccctaatttgaccaccctatcacagttgattgccttttggattggtctttttcatcttttcctacaatcatatacgtttctcatttacacaacgtataaaaaaattgtgtatgaggtgtgctgtgactaattttacagacgtggcaggacttaaacattagtcaaataataaacattatttgaatgtttaagtctttaaactctttaaaacattcaccttggaaaaatacatacatttcttttggtacatcttcaaagataattctttggaattatcttcaaagctttccaggtatattattttgaagatattccttggtagcaaatactcactctgcattaagtttgatgtttggaagaagtctggaataatttggaaccagttatagtgacccagttatactggggtaagaagtacagctatgaccctgttattccccttaaaatctttctgtggctcaccatggctctttggatagagtccaaactgctgtaaggcccttcctgcctcatcctcttcagcttcctgaagctggctactgaatttggacagttctttgaaagtttcttgctttcttacctttgtacttgcattgtctttttttttttttttttttggagacagtctcactctgtcacccaggctggagtacagtggtgcaatcttggctctctgccaccttcccctcctgggttcaagtgattctcatgcctcagcctcgtgagcagctgggaatacacgtgtgcaccaccatgtgcgtctaatttttgtatttttagtagagacggggtttcgccatattggccaggctgggcttgaactcctgagctcaaatgatcctcctgcctcagcctcccaaagtgctgggattacaggcgtgagcctccccgcctggccttgttttgttctttgtatctgacatgaaatatcaatgcctctgccatcctaccctcccctcttcctccccattaactcttactcttccttcaggtttcaggaagcctttcctgacccacataacaagtgtggtttatgctgtgtgcttctatagtatcttaaagcacacactacactcaattgtaaatgaagatttggtcgttcatgtcttcatgacttttgcctactgcccttttctcaatgctgagcataatatccagccatattagttaatgtttgttgaataaatactaatgaagcatgacttgaagtttttaaaatttatcccatcccataatagtgtagcttttaagataataggcattggagttcaggtgcttttccacttacttgctgtcagaatacttaatcttggaaagccagtctccacatctataaaatgaaaaacaccacctcccaatataaagatgaaatgaaataatgcattacaaaggactagctgagtaattggaacattttaagtcaaaagtagtagcttattaaactggcagttacaagaaaagtaaaaatgaccaatggcagcatctttgagtaattttgtagtgtcatttctcaaggttattgttttgaaagttcctttggatctatggttctgtgcagttgtttaaagtcagtctttttatcttacaaatggaaataggataaatttctctttctcacccaagtatatggtaaatcacatatctatatcttttgtttattaataaaaactattaggatgaaagacattctatttaatgactgaagttttaaagtttataaagtagatcagtatagaggggcacagcagatgggaagaatactgataagacagcatggtgttgatgtggctgctcccaccaggcatcagcagtctttgaaaatccatttaattcaccgggcgcggtggctcacgcctgtaatcccagcactttgggaggccgaggtgggcggatcacagggtcaagagatctagacgatcctggctaacacggtgaaaccccatctctactaaaaatacaaaaaattagctgggtgtggtggcgggcgcctgtagtcccagctacttgggagggtgaggcaggagattggcatgaacccgggaggcagagcttgcaatgagccgagatcacaccactgcactccagcctgggcgatagagcgagactccgtctcaaaaaaaaaaaaaaaaaaaaaaaaaaatccatttaattcaattcgtaggcttagattaaaaaatactaaataaattggattgctcagagagtcacatgggaactatactggtacctcataaataagaattagtgctgttcattaaacctggggagctgataaacaggtttattcatttcattctgttcagttgtgctcacgtatttaccaaccattttgaaagcttaaggtagctgagtttgaagataatctttttgatgttactatatattggtatgcaagctgtggaagcagatctccatgtgagatattttaaattactctgatagtacacttggacatttagcctgaagaaattctgaattatagtctgaattagaagaaattctataagtaaacaaacatcctcatagatgaagtaacccaagtttgttgatgatttttttcctcttgaatttggtaaaatgctattttagaaaaattcattaagaggaaagtagtgggttattaaaattttactattccctggactcatttaagtgaaaaaatattttaagaatttgtgaaatatggttttcagtgttagtatttctgataacttacccttgaatacagtgtaaagctcagctgtattgtactgatctctgggtttttttattcttattttttattgtttattttttttttgctgttgttgtttttgagatgcggtcttgccctatggcccaggctggagtggcgtgatctcgactcactgcaacctccacctccccggttccagcgattcttgtgccttggcctcctgagtagctgggattacgggcgcccacgaccatgtgcgactaatttttgtatttttagtagaggcagggtttcaccatgttgcccaggctggtcttgaacttctgacctcaggtgatccgcctgcttcggcctcccaaagtgctgggattacaggcgcgagccaccgctcctggccatactgatctctttggaaagaggatttgtgttaatataaacaggttccagaggctcagttaataattattttgtctaaactttattcagtgtccattagcattaatccaagggcaagagagggagaacgtcatacttggagctctagaacgttatagttggtgggaagacttatcttgctcattgattttttgaaggaatattacatttattttcaagtctaggtttatattccatgaacccagaagcttggataggaaatactgaactttgcataacatatagttttgttgtcagcctgatacgttcttagtttcagatacaccacctccaccgccacctgtggaagaaccagtctttgatgagtctcccccacctcctcctcctccagaagattacgaagaggaggaagctgctgtggttgagtatagtgatccttatgctgaagaggacccaccgtgggctccacgttcttacttggaaaagggtaagtttcagaaggatatctggatagatgggaagaaacctctacatagaaatgaaatttgcggtactgaagagaatcttattttctactaagtgaagttctatttatttgtatttgtgcatttttactgagtttacaaggttcatgattttgaaagttacactagtaaaattctgtgaatatttgattttaaaaaactgatggttatctatattgttcctattggacatgctttttatgaatggtttctatcagtgtttttctgttttcctttggcctcaggaagattatttttccacattattattcctacctccatgctttagaacattagtttgtgtcaccttataatcagatacttcagtttaaatgtctccacatgaaactttcttccacagaataatggtttctcagtttctttgccaagtaatattgggcatttcttttagtgaaaagcttctttgatattagctaattatgatgtagcactttgggatacaagctttcaaatccatcaagactaatcagctcagaaaaaaatgtgtgctgtctggaaggaaattttcttttaagaaaatcaaagctactaacccactgagtctcaaagctggctacacattagaatcacttggagagcttttataaagaaataataggcttccacttttggccaagagagagcaacagtaatcaggtgtaccctccctcctaaaacaggaattttaaaaccccacaaaataatggttttcagacattgaacaacaggcactggagagaaggaaattaatttttttctttatgtagctactataaataccacatgtgatcaagaaagtaaaggagaacatgaacatgagagagacgtggaatatatctttaaaaagagagagagagagaaagagaaacataatatttctggagacgaaaaacacatgctgcagaagaaagcattagcaaccttgatgccatgacaatagaaactatccaaaataaggcacagagaagaaagtggaaaaaaaggcaaaaaggaaaacagagcaacagataatgtgagacaaggtcagatagtctttatgtatgtgtaattggagtccccaggagatgtgagaggaaaaagagttgaaacaatcatagacaaaatatttccacgtttgatgaaaactatattagttgtgtattgctacctaacaagttattccaaaaatttagtggcttaaacaaaacatccattatctcccagtttctctgcgtggctcagctgggccctctggttcagggactcttcacacggctgcaatcaaggtatcagctgaggctgcagtgatctcagggcttgactgagggagactgctttcaggctcactcgtggttattggcaggatttagttccttgtgggttgttggcctgacggcctcggcttcttcattggctgttggccagaggctgcccacaattctggatcacataggcttctccgtagggcagctcacaacatggcagctaacttcattagaatgaacaagcaagaagcgccaaaaagagaatgcaagcaagacactagtccttttttcaccttaacccagcagcgatgacctgtcatttttgccattttctgttcattaaagcaagttaataggattagtcaacactgaaggggtagggattacataaaggcatgaatactatgaggcagaaatcattgggagctgttttagaagttgtctcccacaaaactataaactcacagatccaagaagttcaataaaccccaaatagaagaaaagaaaatcttgccaaggcacatcataatcaatttgctaaaaaccagtaccttagaaaatcttaaagataatcagaggaaaaatgacatattacatacagaggaacaaagataagaatgactgcatggttctcatcaaaaagctgttaagtcagagaattgagcaaaatcttcaaagtaatgaaggaaaatgtcaacccagtgttctttacttagcaaaaatatccttcctaaattaaagatcttttttttttttttttttttgagacggagtttcgctcttgttgcccaggctggagtgcaatggcgtgatctcagctcacagcaacctccacctcccgggttcacgccattcttctgcctcagcctcccgagtagctgggactaccggcgcccaccaccgcgccccgctaatttttttgtatttttagtagagacgtggtttcacggtggtcttgatctcctgacctcatgatccgcccgcctaggcctcctaaagtgctgggattacaggcgtgagccacgaggcagagtctcgctctgtcgcccaggctggagtgcagtggtgtgatcctggctcactgcaagctccgactaccgggttcacgccattctcctgcctcaacctgctgagtagctgggactacaggcgcctgccaccatgcctgggtaattttttgtattttttttttttttggtagagacggggtttcaccgtgttagccaggatggtctcgatctcctgacctcgtgatctgcccacctctgcctcccaaagtgctgggattacaggcgtgagccactgcgcccagcctgtgctttgtattttatgtggtttgccttgtttaatataagaatgctttgggctgtaatcccagcactttgggaggctgaggcgggccgaacacctgaggttgggagttggagaccagcctgaccaacatggagaaaccccgtctctactaaaagtacaaaattagctgggcatggtgatgcatgcctgtaatcccaactactcgggaggctgaggcaggagaatcacttgaactccagaggcggaggttggggagagctgagatcgccccattgcactccagcctgggcaacaagagcgaaactccatctccaagaaaaacatgctttgaaatgttagctctattgtaattcccattatatagttgaataaaaagaagcctaggaaagttaagtatgtactgtaaactattaatagttaagtgttagaattgggatttgactgggtggtataactctagaccccacactcttaaccattgtcctaaacgtgagctctggcatctggcagacctaggattgagtcttggctttacagtttatgagcattaagtcctccctggaaaacttttttactgcccgttttgtatctcttaacttttgtaaagccatctattcttttgttcttctggctcagtgatacagcttttagctagaagtataaatgatatataggaattgtcagataacatttctgtcttcacaagactgtgacagtccctttttttttttttttgagacggagtcttgctctgttgcccaggctggagtgcagtggcacggtcttggctcactgcaagctctgcctcccaggttcacgccattctcctgcctcagcctcctgagtaggtgggactacaggcacctgccagcacacccggctaattttttgtatttttagtagagacagggtttcaccatgttagccaggatggtctcaatctcctgaccttgtgatccgcccacctcggcctcccaaagtgctgggattacaggtgtgagccaccacgcccagccgacagtcccttatctggttcatcttcgtacctctaaaagtcagcatggatgctctattaatgattgttaaaaaatgaatagtgccattaattctttctggggaattcctagaaagcttctcagagaacatggcgttcttggtgccttgaatgatgaataggagtttctcaggcagagaagagagaaaggaagggccttccaagctgagggaatcacgtgagtgagagggcatggctgtttggggcagagcagtgtccagtgcatgagggtgggggtgggttgtagggagagagggtgatatgagcacgcaaagggaataaattgtaattaggtggtgggtggctaaaaatgacaatgcgaaggtgttggattaaaaaaaaaatctggtagtagagggaaattatggaggatttttaaaaaggttaatgataatatccatctacttatgtaactttttttggagatacctgataatagtgtagagtgcattggagaggaaaagtaggagttgtaaagaccattttggataaactttgaagcaagggataatggcctcaaccaaggtagtggtgctgaaaagattgtttacataaataagcagatacaaatagaaggatttttcaagtggcattgtaactgcacttttcaaagttatttgccaaaaatcaaataacgtatcttcaaaaatcatgtttgatgatgtatcatcaaggtctttcttaaattttgttgaaagcaaaggaataagagccacctgatttgcaaacggattgagttactcagtggagtaattcttttaatatgagcaccattattttgaatggtccctttggcacccagtgttttgtactttaagacagtgcaccactgtgctttttttaagtagaaggacaaaaaggatataaaaacttttatgactgcttgactgaaggtatgatctcaagcagatcaattttaggaagcagtacttaagattagaaaatctagaaagaggccaggcatggtggctcacgcctgtaatcccagcactttgggaggccaaggccggcagatgacaaggtcaagagatcaagaccatccagccaacatggtgaaaccccacctctactacaagttcaaaaattagctgggtgtggtggtgcacgcctgtagtcccagcaactcaggaggctgaggcaggagaatcacttgaacccaggaggtggagcttgcagtgagccaagatcactcgccaccgcactccagcctggcaacagagtgagactctgtctcaaaaaaaaaaaaaaaaaaaatctagaaagagagccagttgcatgtagtggctcacacctgtaatcccttaaagtgctgtaaagcactttaagaggctgaggccggcggattgcttgagacgaggagttcaagaccagcctgggcaacatggcgataccctcgtctctacaaaaaattagaaaacttagccagacatggtggtgcatgcctgtagttccagctactctggaggctgaggtgggagcatcacctgagcccaggagtttgaaggctgcagtgagctgcgattgcaccactgcctggggacagtaagactctgtctcaataaaaagaaaaaaaatatcgagagtccctataaactgtctgccacccacactgcttagaaaatctcaggtaccctgagtgataaatgtaatcaattttaaagatgggtgcactaactggggcggtgactatgatgatggagagaagtcgagtgttggtatttgggagatttagaaggtggaattaacaggacttggggatgtcggggaaggtgagtgaggggaaggcaaagatgactcctagtttcctggctccacagaagcgtagtaatcagataactgggagaagacactgtcatggaagccatggaggaaaatgtcaagaagcaggcagaggtaatcatcattgccaaacactacaggaacattagacaaagaactgagaagaggctcaaaagtagaaggccagtttttttcaagtgaatagtttcattggagtggtaggggcagaaggaatatggctgtattagttaagcagcattattttcattgaaacagcatctccagtgggttctaaaacatttcttagaatacattaagtggtttaaccaactcttcattgatagtgtccaggttaactttgctctacctcaggacaggttataacataaattccaaagtatgttaaatgttttgctggcttaggatgaacttttttccatataaataaaatgatgtcaactcacaatatgtaatttaatacaaacagtatattgaaatggataatcttactagcattttgatttttccagtggcttgctagtttagggtacttaattgttaggtgtggttgctaataccctacaatatttggtggtcagtctttttagttcagatcagtcacttctatgtaacatgctccttttgggcctttttgttttacattgttattttagtatcaccttaatttttcccccaatatgtatttaagttacctttattactcactgtgtaactgaataatatagaatatagatgtatttagaagtatccaaaaagctaggccttgtgttaggcgctagggatacacagagatgagtgatgggcccttacctccaggagtttatagtgtagagagttttatgtttagattgctcctctttgtttcaatttactattttaggagagaaaaaatcatctgggtccttttttttctgagacggagtctcgctctgtcgctcaggctagagtgcagtggtgcaatctcggctcactgcaacctccgcctcccaggttcacgccattctcctgcctcagccccacgagtagctgggactacaggcgccggccaccatgcctgctaaattttgcatttttagtagaggcggggtttcaccatattggccaggctggtctcaaacctgaccttgtgatctgcccaccttggccttccaaagtgctgggattacaggcgtgagccaccgcgcccagcccaatctgggtccttttctgctggcatggtaccattattctttgcttatctttaactctgcagcatacttcatataaaattataggattaaaattaaaaagagaatcatttaagctaagaagtttttttcagttttacagaccttcataaaatattctagaatgtattcaattgaaatgctaaatatgaacaatgtactttgaaatttagaatgtatttttactttagcagaaacatttagaagaacaatgtgtaagtccttttctgtttcagtcataactgcacaaaaaccagatgtctagcattttaagttttttcttacatgtgctttatcagttccccatatgattttgatactatgcgtgatatacatgcataattggaaaaagtgactttcttccctattgccaaaaccagttttccagactaaataaaatctagacagattttacatttctcaacatcggtattttgaatattggtgaaaacacagatactttattacaccgctttagagttactttgataaaagtttgttgcactaaatcaagagtattttgctttttgatgaatggctttacagtaaagaattagatgaagtaaactgctggtgtatatctttccctggagtgaagtaaactactggtgtatatctttccctggagtgaaaatgaatattcatttaaaaattacttatcagggtctcgttctgtcacctgggctggagtgcagtggtacgttcagtgcttactgcagcctcaactttctgggctcaagcgatcctcctgcttcagcctcccaagtagctgggaccacagacgtgcaccaccatgcctggctaatttattatttttatttttttagagacagggttttgctatgtttcccagaccagtcttgaactcatggcctcaagtgattctcctgcctcggcctcccaaagttctgggattataggtgtgagccacagtgctcagccagaaagtgaatattctatacagcatatttctgatttttgaaaaagttaattttaaaatagtgaatactaattttggcaaaagaaaaagctgaacagttgttaaaactctcagctctctaccattataaacagtctctggaatcatgttaagtgtaaattctatctaatctagtttctacttttgatttgttttgagacagtctcactctgttacccaggctagagtgcagtgggaaaatcacggcttatttcagcctcaactttgctgagctcaggtgattctcccaagtagctgggaccacaggcacgcgctaccatgccaggctaatttttttttttttttttgtattttttttttggtagagatggggttttgccatgttgcttaggctggcaatttctacattttaaagaagaaaatgaatgtagatagagcttactaactttccacttctaagcatctctgttacaacaggcttcatattctcttctgaattacttttcatgggtttgcatttctttttcttttatttttcttttttgagacaagagtctcactctgtcaccaaggctggagggaagtgttgcgatctcagctcactcaagtgattctcttgcctcagcctcccaagtagctgggattacaggcgcccaccaccacgcttggctaatttttgtatttttagtagagacggggtttcaccatgttggccaggctggtctagaacttctgatgtcagcagtctgcctgccttggcctcccaaagtgttgggattacaggcgtaagctaccgcacctggctggatttgcatttctttaagcatcaggaatgttgtctttccttaaaaaaacactagaaaatattaggttgactagaaatgctaaatattctaaattgtattttctgggtttttttgtattttcttatatttaaacttgtatgccatttaactacatttgattgtgttcaggcatttggttatatattgagaaatgcacactgatctcttcctagcaaggatcttctaaagtattttctgaccaggtgcaggtggctcatgcctgtaatcccagcactttgggaggccgaggcaagtggatcacctgaggtcaggagttcaagaccagcttggccaacatggcaaaaccccgtctctactaaaaatacaaaaattagctgtgcgtggtggtgggcgcctgtaatcccagcacttgggaggctgaggcaagagaatcgcttgaacctgggacatggaggttgcagtgaaccgagatagtgccactgcactccagcctgggcgataagagtgagactgtctcaaaaaaaaaaaaaaaaaattctggtgttcctacaatatcactataatggaaaatattcacaatttaaggaagctatttaatttttattaaaacaggccagaaacaaattttctttagggcacattatatcagaagtccctgttgtagtttgtttctcattgatttatgtgaggcacaaggttgcatgagaaactaacaaagacagtgtgtttgtcttggaacaatggataggtggagatttcattgagtggtataaaataggtacagaagatgaagaggttggagcaaaggataattcttcaagtggaattgaggatgttacagggcatcccagtataactaaactgttgaaattgatataatacttgggaaccagagattatctggttgaaataagataacagttgaaataaccactgagataatgactcaaagagccaagttaccaagtgatttaagcaatgaaaatcacaggagggcttataggtatctgattttcttgtcacttttagtctgttattatagttatattaaattggtgacatagtgcagcatatgttttgaaaaaatatatgtagcggactcccatcattcatacatttaacttggggaaattgaaccaccattctacttagcgaagaggcataggctccagagagagtgagaaaggagacagaaatctgctgttccattagtctggtttctcacttgactctcatagtgtatctcattgccctagtataattctaaggtaaagaaaagctttaaaaaaaaaaaaaaaaaaaccacaatatggtatctcaacacaaactcaaatgaagaaacagccatctttcttgattctaggattgtgtacctcttcaatgaggtacttccctgtaggctcttaaaaggtcatcaaaagcacatttgattaaatgtgctttttccccatttgtactcaatttagagcctaacatccctagaaaatggaatttcattgtatatgactgggtattacttagaaaaaaaaacatgtaagttttggttggtgtttagaaagtcaccatgtttgagtgctacaggatttgggaacagatagctattcactggcttggttctgtctttctaggaatattactgtctttcacatcctgttttgttttcttccctcctagttgtggcaatttatgactatacaaaagacaaggaagatgagctgtcctttcaggaaggagccattatttatgtcatcaagaagaatgacgatggttggtatgagggagttatgaatggagtgactgggctttttcctgggaattacgttgagtctatcatgcattattctgagtaaagctcagcagggctgtgcttgcctcacaggaatagtcaggtcttcccagattatctgaaggccctggggattccactccagtaaagtagaatgaaggatacaaatgataaaaattacacttttttttttggtttattccccagtattaaaaacaaagcaagctgagtctgaacaaatggatctttctgccatcatttgtacaatgctgagctgtctggattgaaataaaatgaccatttttatgtatgtcaaaggtataacagcataactgtgtagccaaaacaaaatcagattaagactgattcagaaaaatctgggatctttctcaggaatactgtatacccttgggatttctcctcctgcagaatctgtggcattggatgttcttcattgcctgtgctaaggggttaacctcatggcccagtgggtaccctagccccttcttttcttccacttgtatgaagaggagggaaccaacatttaaataccacacttaaccatttttacaattatttcagatggcttttttcctctgtgacactgtaaattctgcattctctcagcacttgagtgcaccaaacgagtgaatgctgaactcacttgcatcccttcatgtttctgtttgtggattataaggatgatgaaatgtgaaagtctcccaacactctgagggtggtgaacgattgccacccgtttgattttaatgtgctgctgcatgagactgcattgttgctaatggccagtgtacccagatgtgaagtgtggtaggctggttcatatgtggaggtgggtgtgtgaagctagacacgaaggtccctaaggttctgaagagacttgaactgtggaaatgctcttagcaggcatcccgaacccctgcttcggtgctgttttgaggagtaggatcttggagttcagaccaactatgactatcatttccttcactatctagaaaaacgctattctactttggaagagaatagtagttattttcaagtctcctgacagtcactgggagtacaaggtttgctaatgtgctctctggacgttattaatggccagtattagttgctgctgtattactgactcgcttagctgtagaaagggtaatactctcctgattttgtatgattggactcttaagtagctgctgttagtcagaattaaaacccatctcagactaagaatataatgaataagattaataggccaaaatatgtatctaatcacattgataaaaattaatataactgacacaataaaacacatttcccccatctgtacaataaatacagcttcaaattcagtggagtctgtagggcagataactttaatcatcactactgtagtcagtataagaaatgctgaaaaaaatccaggagggcttgtctctttgtgggtggtcactgtgatgttgggccagctcctgttcaggtccagagctgctaacgtgggttctactcagtcccagtgacttggccagaatagagctttgccaggtaactgccctgtgctaggtgaaaggggaaaagcagtagctggatatatttcaaatgaggttttgaacaagttcagaaagtggaacttgattgaaaagtgaacaagtgtagtagtgtgtgagaaaattcagatggtgtcggatgcagaagttaatattccacttaatgttatctgagcattaaaaatcatcagcatttaactgagaccccactatagagtttccttatcaagactttttggttttaaagttgtttttaatgcattgcaagttacaatagctattttgcttttagatttttcccagcactttgtatttattagctttcattaacttgcctccagtatacattccacttcgtgcttttcttaggtcatttctacatcccttattccttgttttcctgcagtgtaatggccctgaatgtcctctgagccttcagctccattatggacccaaactagactatacttggataagttaagctcttcttcgtgtactggtctataattagaaaaactgttttaaattagatgttcccattatttatttaaacagctttttgctgagaaagcttagtggattaatgaggcagagggtgttttgaaatccaataaatagttcccacaggctgggtgtggtggcttatgcctgtaatcccagcactttcggaggccgaggtgggtggatcatgaggtcaataaattgagaccatcctggccaacatggtgaaaccccatctctactaaaaacacaaaaattagctgggcgtggtggcgcacacctgtagtcccagctacttgggaggctgaggcaggagaatcactggaacctgggaggcagaggttgcagtgagccgagattgtgccactgcactccagcctggtgacagagcgagactccatcaaaaaaaaaaaaaaaaagttcccacagctcaccactacagaagcagggaagacaactatgcagaaaacagagttagtggcggtcagcaggaatgcagctggtcttttggacccctacgggatgggggcagtgcagaagacactggtgaagtcctttatactgaagacctgtggttgggagcaggggtagtccatgggtctgctgattttttttccctatttagtactaatgtgtgtgtgatctttgttttacaaacagtaccttttgggttttctgcatattttataatttttgtacagttttgaattctatagattgtcttggaaggatactgtgtgatgggtcaggcacacagtaattggagacttttaatgtatgtaatatttcatagattgcatgctattaatcatctgtgagggtagtattttttgttttattgtaagtttccctctttttttataaattaaaagatggttggtattaggaatttcaaatgaatgcagaaaatcttacatgctgtgtactattaatattataacagacgatccaagtccaaaatctgaccaataaagcaaccattttatcaagatagagggattctaatgggagaggggattcttccctcctgaagtttgtgtgtccagtccccttaaaaaaaatgaatagttgtcttttcttgtcatattaatactcgaaagtccatggtggtattaatgaaagtacactttattgttgcctttgaacttacggccaaggcaataaatcagaaacaaaaatagtgccaatgtgtcaaaatcgacatctgagagattcagcctcccatttggaataaatatgaatcttctaagctatcttgtttaatattttccatcatttagctacttcctatctccctcagaggcgcctgctgttcccattttagagttgacagtggcctgctaattttgctatgttcctaaaagttactgggtgtgagacattttcatcccctcctttttcctactgctggtgtttattatccagctagacaatattttatgcatatttaccgtgatgtctggaccgtacctgtgctccttggcagtttatgttgaagataactaaagatttttctctttgggaggcatcaaaatgatggtagtttgcttttatctttttatgttcattttcttttagtaggtgacctttctgcattaagaactgtttttatcttttactaccttttcttttctcctttgtggagacagcatgacatgtcctgaaggtcacctttgcctttgaaaaaggtttgatggaggaattcacaggtgactgacaagtctttgaaaagaatgggatctgctcacttctggtctttttggccgggaactcctgattggtgttaaggtggtaatttcccccatataagatttagaatcactgagtttgagctagatgaaatttttaaaatttctggttgtctcattagactgatgaggtgagttttcttcttcatatgaacagctagttaataacagcagagttctcactcagtgctcagtacttaattttccactgcaccacaactgtcttaactaaatgtgctgtatttttctttaaaagttaagagttctatttggtgttttcaggaatatacgtgaaaagacatgccatgttttggtaaataccatcagagttgtgtaaaggcgtgtactaagtgcaatcttaatttgtggaaataatcttcatttacccctcctaaaactacactcagtataaacactttcccataaggtgtgtgcagtaaaaatgttatattactccaacactggcaggagcacagcacagcagccttattggagagagccttataaaagtgattaaatggaggcattgagctcattacctttaagtttactttgtgctgacctttgttcctgttttgagaatctcatataattattaaaaaaaaaaaacaattaaaacgaaacggcggggcctagctgtgtataaatgatccttgctgaatatcttaaggttttttgtaagaaaaaagaaaaaccaacaaaaaaagcttattttcacattaaaatgaaacctcttttgcaacttaagaattctatggaaaagcagtttttatcatattttgtgtccatgcaccatttttcttaaaatggcttacaaaaaagaatgtaaacaatttgtgatctggccagttgtacttttagctcccagagggagagttggtggtattatgagttgagtaaaaaccatccaggggaacttgagggagcagtctgttgccagtaatgttccttgtgtgccattaaaccacctccagatgagtggaggaacatcactttttaattttttaattgtatttggaattgttgccgtgtactaagaacttgacctaaataaaatcccacaaagtatattcaggtgtcttgttaacttatttatataaataacctctttttctaaggtggtatcttgagtttacgtgttagggataatctgacttttctgttgctctaaaccagggagctgccttttattactgaagaagtcgtctttttaaattttcaaagatttaaaatgttgagctttaaatttgatctcaagtttcttccctgaagacagctgttctaattaagaactttctaatcctgtttttgctccactcgcacctggggttttcttaccacttttctccaaatctaattctgttaatgtacagtttttttaattcaacagacaaacactgaagatgggtgttgactaaaaaatattgcagactggtcagaagtgaatctaaaagacaaaccactaactagcctgtgctttgttgctatgagagcctagattataaaagaattttctaatgatgtatctgagggtagcaagtaagtttgtcttcacaatacccaaaatgatgtttcagcttttctcacttttcaagcccatcttatttcctctgtacctttattattttggtatcattaggtaaggtgaagaataatgtaggaaacaaatacccagctaaaacatttatgggtttctcgtatttgtgaataggattttaggcgtcagagcagtcttgtcttgtctcaaagatagatagtatccaatcttttgttaataagcctattgcttgacttttttgggttactttggaattacacatttggttgaacggctttgtggatctggggcatatgccaattaaggggcacatgccatgcgttctgttttcctgtcagcctgtgtacactgctgcttctgaaggcataagtacaggtgcagtttccacaaccacgtatgattgacagatggtgaacgaaaggggaaggcttccactttttttgccctagtttggtacataataaagtgattgcaaacacattatacatttatacataccttcacatggcagtccaacacgtaattgtgactccaaagatttgaaacaaacaaaaggcattcctttttgtattactttactttgtacttagttctttgtttaaagaagaaaaatcttttttaccttttttttttttttgagacggagtctcgctctgttgcccaggctggagtgcagtggcacaatttcagctcactgcaagctccacctcctgggttcatgccattctcctgcctcagcttcccgagtagctgggactacaggcgactgccaccactcctggctaatttttttttgtatttttaatagagacggggtttcaccatgttagccgggatggtctcgatctcctgacctcgcgatccacccacctcggcctcccaaagtgctgggattacaggcgtgagccaccgcacccggctgagaagaaaagtctttctttaaaagctgttgtcacttaatcaccaatgtatttaatggccaaatttccctagttggtataaactactcttaaaagttaacaaattgaacatatcaaactagtttatttaccacacttaatttcttctgtgtatggcctatgttttgggtaccctgacatgaaatgcaaaaccagattcttaatggtgccgatccacaaacactcaaagtccccatgtttaaatgaaatctatgaattttttttattaaggatttgataagctgatataatgaaaacatgtaaatgaaaaacatttacactgactgtacgactagtgtgctaagccattacaatagtttactgacataactggcaagagtaacttggaaaataacttaatccagcagaacaaaaacatcctcagaaaaacatcctcagtagtactgaatatatctctctcatatatctatctatctatctatatatatatatatatatatatagctttgcacaatcagggagcaaggcacataatgaaatgagcatacatttatgcagaagaaaataatagcaacaaagctgcgagaaaaattgtaacttcatcttcactgagctgtgcataatcctttgaataataatgtcctctacctggtacattataatgaagttccttgtcttcttcatgctttaaaaaagtatacttctacattgtatctacctatggcaaagctcccacagcctacaagttggtgtgagccttgactcttgttttttaaagaactgagggagggagcaatcccagttaaatataatgtgcaattcccctttaacagtaaacaatgtttttaaaacacttagcacaagctaattttatcttaaatgtacatctctgtaagagttcactagtggctgatagtaaaatgaagcaaaattgtttgaaacattccagttaatgcttattttctagaaggggttattttacaagtagcaaaaaaaaaaaaaaaagtaggaggtggggaaataatatgaaaaacggcagtttttggtattaggttacaataaatttaacgaatggacagtttgcaaaatataagggtttctccccctttagtgctgcagacaagttttactgcctaagacgttgaggctgcaacaatcatgagcttggtattagtagccatccatgataaacataattaattctcaacttaaccatctataaaatatgtagtgttcaccatcaccctgactcaattcacttctctaaatgtctttggtagaaagcagccagaccccacgtgggtagtgatgtctcttgtgagacacttttcatttctgccaaaactagaaataccaccttcctttactttcattagcacctcaaagtttgcttgctggatttctttaaaaatattctgccaaaagagttgaaggcactgggggtttacagcaagtattttctctttaaaacggtttattacttcaacaagcaaagagcaaaccaactggagaaatgtatgttttttctttttatttatcaagttttattctacagctaaatttcagatttcttttacatatagaccttgcaagggcacggtaagaactgagcacttgttttatttgagggataaaggtgtagaaattttctctttgaattttataaggaaaggctgggtacagtggctcatgcctgtaatctcagcattttgggaggctgaggcaggaagatcacttgtggccaggagtttgagaccagcctgggcaacacagtgagacccccatctctaccaaaaaaaaaaaaaaaccttaaaagataataagtatctaattcttttatacttgcatttctctttggatcaaatctcaactttgtgagaggtcatacatttctacagggttaggagtaccctgcataatttatacaaatgtaaagtgtatattaaaaaaaaaaaagtgaaagttacctgcaatctaaagggttttcttcccctagaaacagtcaccctctcgtcaagtgtatgacccaattatacctattttatgaaaagcaaggcatcacattgataaccatacaggatcctatgggtttaactggtctaaacttgagtggattaaatcagttgtaattagttagctctgtaggtatatgaaaaacttttggtaatgtacaaaaataggaatgggttttttacctgtttaaagtcactttgtgtttataacaaaattacttttagctgaggaacaaaggtgacaaagatttctgttggtggctgagagtcaaagcaggccaatccacaccattacctgaaatatttttcaggctaatttataactttatggatttcctcgatacaagtttattagtttattctccatatacaagtttattctcccagaatagcagcaaataaaacttgaattggatgtacagctcctaataaccttgatgtcagagttgtcacttggttggaattattatgatcccccaatttaaattttcttgataaactcagcgttgtttgttttcagtgacaagaaaacatacatggaaaggggacccaagacagttcaccaagatagttcacagccctttgcaggatatgcctttggtgggtgggagcacctagattttagaggactataaaacgccatgtttactttgtttgaaattttctgatgaaaagtcttttgtaacttaacattccacattttcatttaaaaagtcccagaaatataaactatccaatttacaactaaggtgggtatctgtaaaaaccttaagaatagttactcttcccaagagaattacagcgtctaagggggggaaagaaagcatctgagcagtaaaagtcaagctggtaaaatccaatacagaatatctaataaaccataagttattttactgagaatagattctgctgccctacagcattggtgccaaaactctaagcatagagtgattctactttgaaattatccatagtagaaattaggagtgtcactaattaagcaagtcactacctctaataagcacctgtttgcactgccctcagcagcaggatgagttaatccatgctgttcacttttcagtacagccaagtcaactgcacagacttgaagcagccaagctgggtgagagctgcagagcagagggcagtgaaagaaggcacagtactagtgtcgtgcggcagtagatgctttccatgaatacaccagagaaaaagagctacagaaatacagtctaggaaaagctacatcccaacaaaaatccaaattaaagaaaacccactagggagtaaaacagaagtataaagtatcactttagtggttttttaaattcagttcatacatgaggttaaaacatttttaatagccatttctgtctgtggaggaatgtaaagggaaatggcctgttgtcggacaagccactggactggggttaaaatgagtctcctcctctagccttactctcttcctggcatcattagtgttcaaaaggatgtctgctattccaggaaaacagaccagaagcatctgttcaggatggctatcatcaggattgatacaagcaagaaattccaagaaatcctgcactgaaaacataaaggctgttgttttagggctcaaatcatgggtgaaaaaaggttagcgggtacattttttccccctcaagaaaaactgaagtgttgtctaccttctcatgagaaaatcaccaccacaataaaactcaaaacctcagggatgaatactttgataactggattcatattcttactaactctaacccacaaatatgggtgcccctcaaactataaaactgcaggcagaagactatgagaaattcattcatgaatcacagtagcgcttggcaatctactcaaacattacccaaatttctgtgcatgcttaaattaacaatgcagatgtgttaaagatcacttcataaatatcaaacacaaaacttggtgaacaatttgaaagacctaaaaattaatggtatatattcttattgctccataaccacatgaacataaccgaacaatattctggagatgtagcaatggagaggtgctgttcactctctgtttacgatgcggttttcgtggagtgtgggttatgcaagaccttgagtatactgtactaattaagcacttttgctcattctagaattatttaccatctcttcccccactttactggcatcactttttccttgtgggacaatgtcaactgatttctgcagtttgcattggtaatcattaacaataggcacagactttcattacaagatgtgctccccttataagtgctgggatggcccatttttattctcttgtttaggagctgctctgagattgttttattcctaatagtccaatttatcataagttgatgagagtacttatttctctcatgtaccaaggaaaattcacagaaaaaagcatatagaagtatagtgtgtcgttagagcactgactccacgttataccaaactgcacacgcataaaacgtaatgtcagttactggacttggactgtcccactccatcagaacacctagtaacctgaactaatcacaaccaggctgcagtcagcaagggtcctggtagccccagtagctataaatgaaactgtcttccctctccatgtagtcccatacttaatgagctttttgtattacatattataacccatatacaaccagattaatgacacctgtacaggggccagttctgttctctcatcacccttcccttctatagagcaatgctcaaaaaatgcattttagaaaatgattttgtttttcataatgcaccatattggggcacaggatgtgtatatttcatataccaattgtctacagatatgtaataacacctacctaaagcacatattttaagaaggtaactggtgacccaaagacatactgggacagaacattacagagataactgtgttatccatcctcttaaaatcaatcaaagtgaggatcatgaagccaagttgataaagcttcataaaacagtactaaaaaggaactatccagaattatagcactaattatccatgtattgtaggcaaagagcttatctgtcagcacatcctaaatgtgggtggatcactgcagcagtactgcagctagaacagctgagttaattacgccatgtatttactttctatgcacaaccacatacagatgatgtctgtgaacatttccccatcctgcactagttacccgttctatgaagctgagagattttcctgatttaaagtgccccttcatgtatagcaatgaagtgtcagtcaagcaattctaacttcagccaactggggaaaaacaaacacaaaagccttatagatacaccaaacattctggtgatttttctcaaccagaaatagcacattctacatctattccttagttatataatacacaacatgcacgaataggctacacatggacagacacttataaataccttctaaataagtgattagaagtttttggtccaatccacatgatatagaaatcttaagagacaacacacatccccttctatgcctcttccacccaaaatacagaacacccattttcagattaggagagaaaaggaataaatagaataactctcagctctctctctatatacacatacacatacatatatgtatacatatatacacacactgtacagctgtgtgtacatgcacgtgtacacacacacatacacatatagctggacactacctgaataacatcataccaggaggctctgaacacctgaattcacagatgatcaggtgagctgattgtagcagtgattacagatatcatgaaaataaagtcctatggtggctaccagtctctggagagcttggtgttctggtctcttttggggggagcaggagggggtcctctccgcaacgttgcatagcctgatatatgactgcctccgtaaccagccttctgttgatcagacagcagttcagggggtggtggaggcaatgccatatcatccatggtggctgttggttctgctctggacatgcgggaggagagtgagccgtgccgagtgatggactttcgttgcagtgtcctgttgaggtcagccaggaatccaggctggacactaaggctggatttgggagaggtgggcacttgtggcacaactgtggccattgttggctgctcagaaatctcagcttgagtgaggcgggtgctatcattccgtttgggtcgtgtgggtggaggggccttcttcactgacattttagaccattgttgtggttgaggattaacgactgccacttttggagaggtgtttcccgagaaaactgctggaatctcaatggggggcagaggaagctctgtttcaggtggagggggtggaaaatcagaatcggatggaggagaaggaaattccaccacggagtcctttccacgcccactcagaacaggggcttttgctgacacacacccttgttggagaactccaggaaggttgactccagaaagattgagttttccaggcttggggggtgctgcaggaggtggtagggtctccttgctgggagaccctgattctgctggcggtgtaaacttgctgactagactgtccaccgagggtctcttgggctcggggtgctctgcaccactgctggatttaatgctggagttgcgctgtggggttgggggtggtttctttcccccagggctggacgtcttactggtctttttgcctggagatccacttttgtcaggggtaggagaagctgtgggtggaggtggtggtggtggggctgggacaggtgatgggggtggaggaggaaacaccaggctgctttcaggagggggaggagggaagtccggagaagggactgggatggagctgggctgccacttgggctttgcttttactgcaggaggggactgtggagctacatttgctgggacaggctttaagggctgagattccatggcagggggagttggagggggtggaaactggctggctatctgcttcacgaccgagggcaccggtgacagtggagagggagggggttttgcacagaagctctgttgcttgggtaatgttggcgggggtactggaacaggaggggtagggggagagggtggaatgtaagaagcagggaaagctggctgcttttttgctgggggcactggaggagtaggtgtgggtggtgcagcttgagtcacaacaggtgccacagtcttggtgctggttggtgcggggatggtcacaaggggttttgggggagcttggggagggaggggtgcagggataggaggaggtggggggggtgttgggggagccacctgagtaatatgctgaacttgatggatcttcagtggaggaggcggggcactgaactgtggaagggatggggcacacggtgcaggctttagctgggccatggcagagcctggggttgggggtggaggagggggagggggtggtggaacaactccattggggggtaccaggatctgaggcttcactgactgtgactgcatcactgggggtgttggcggcttaaacagggcccctgaatgctgagacgcattctgtagccgtgttattgtgctgtacttgacgaacattggggctgctgagcctgcagaaggtgcagactggctggggagtgggggaggagggggtggtggagggggtggtggaggaggaggtgggggtggcggaggaggtagaggtggtgaaggctgtgaagcagtgtagggggtgactatcttaggttgcggggataaagggggcacaagtgaagtgtagggccgattcatagactccattctggcctaaaaggagtataaaaagggagtgggagagagaaaaacacaacaaacaaaacagttacagaggtaagctttgattgtgtaaaactaaaaagcagggagtctgggacatgcatgaaaaggatgcagaagttggtggtgatcataaagatggacaatgtcaggaaggctaaaatctgattgtgcgggcaagaaggaaacagaaaacttgttttaccccacagtaaaatagctagaccatctaacaatctaggaaaaatgtccggctgcaaaagctgtttgaatggtgacaggatgcatgacttctgaccttggctgtatgactttgacacagcctgccctacatggaaccctctgtggcggtcctctgagcactggacttccaaggggagatgtgatggctccagtttacctttcagtccatgactgcatccacatcaagcagatgctataactgggtttaggagggcttcctggtggaatgaggatggctttttgatgctagtaagctgacacaggagagtatgagaatgttgagcaggcgtgcacagtcacacaggaatgaataagcttgacacacacactcgtgttggtgtgagacaattgcatccaacatgcacagaagtccagcaatgcaggtaaaggggggacattctttacatttgttttactggaaaatacataaagaaatgctttgtaaacattatagcaaaagactgtaaaaatatcatacagaaaaagccagaagaaattaagaggaagctctggaaggctagaataaagaaaatgtatcaagaaatggcagctagcatttgccaacaaccaacccatctgggtagctgaaatgatcacatctggtagtttatttcgtggagctaatcatgcacgatggtggttcaggtactttgaaaagaggaaaggaaggacccttgttttaaaaactttaggtacatcttttaggctctttgaacaaactttgaggatccaagataaaccatttgttttcaattttgaatgacatcgagaatgcatgggttagtgaactagaaggctcattatagggctgaattctaatagccatccggacattcacatgtttcttttaaaattacacaaaaagattagtctgtgagattgggatacaggcgtcaccgaggttaatgtgtttccagagaacaacccctgaccttaacttgaccctgtcttggctgcttcaggggcgcaggccttagctgtgctggccttctcatttggcacctgagactgaggtaacaggagaagaaatacagagtgatcaagccttaaagcattactgctgacagcagggttcctactcttctgaaactctgtgcaataacggactttgctgcttaatcacagaacattttgggtctgtgattttgttttccttggccttacacataactaggttctataacttaaaatgcacacggatctcaccattagtaatttggtaaggcaaaggggtttttctttagccatccgaattctgtaaaccaacttctttagtacatttttaaaatactagctccatccaaattgattaaatgggggaagggagagagaaattatttcttaaaagtttgagtctctaataagggagttaaactcagtgttttgagaatttagatcgttagaaccaattctcaaatgctcatttctgaaggaaagggcttcagccccacatggtgctactaaggccttctcttccctgcgggagcccagttagtgaaccacatatacgaatgaaggaataaaaggaaaaatgtccatttattctcattcgtgaatgtacctgtataagtgattcagaccaaaagcaccccccaccaaaaaattaaataaataaataaaaacaattattagtaaaaataaaatagttgagcccagggtgccactggttcctcaatgatggagtgacctcttgcatattgaaatggtgactacagccaggacacatccttgcctacacaactacagatgatgtctgatagaaggccatgatgtctttcaaatgaactgaagaacctctctattttcctaattatagtcttgcaataactatactcatccttcagtctcactgcacaatatactatgcaaggctcaggaatccaaaacttttaagggaaatgattttaatttagtcttccacataaagtataatttgaaaaaattcatcaatgcccaaagaaatggcaaaagcattaaaaaaaaaaaaggtaaggaatgagtctgaataaattaaccaataaagaaataactggactgaatatggtggctcatgcctgtaatcccaggactttggaaagccgaggcaggaggatcgcttgaggccaggagttcgagaccagcccaggcaaaatagccagaccttgtctctaccaaaaaataaaaaactagccaggcatggtggtgtgcacctgtagtcccaactactcaggcaactactcgggaggctgaggtgagcaagcaggctgaggtgggaggatcatttgagcccaggaggcttaagtgagccctgataacaccactgcattccagcctgggtgacgggaaagggagagggagagggagaggaggggatggggagaaggaaggaaaggaagggaaggaagggagagaaggaaggggagggagggagggaagtgaggggagggaggaaaggagggaaggaaggaagaaaagaataaaaaagaagagaaaaaaagagagagagaggctgggcacggtggctctcgcctgtaatcccagcactctgggaggctgaggcaggtggatctcgaagtcaagaggttgaaaccatcctagacaacagggtgaaaccctgtctctactaaaaatacaaaaattagctgggcgtggtagcatgtgcctataatcccagctactcgggaggctgaggcaggagaatcgtttgaacccgggaggcgaaggctgcagtgagctgagatcacgccactgcactccagcctggcgacagactgacactctgtcaaaaaaaaaaaaaaaaaaaaaggaagaagaaaaaaagacaggaaagaagagagagaactgtaaacagcttctctagaatttagggcatttgcaatagatggtgttttgccatccaaactgcttaaaggtggaaaggaagaaattgttatttcttaaaaatctgagccactgatgaaagaattaaactgccagttttttttgtttttttgagattttaagtcattagagccaatttgtaaaatactcatttccaaggggaagtcaaatcaacaggtctctctgaactgtctttacccactacaattaggaagattgaaaattaataaaggagactgaaataaggccaaataagatccccgataaagacataagagagcaacaatttaaacccaaaagaataccacagaattttcaatgtaaattaaaacgaagctgttaccttgctggactcttccaactgagtgcctcgtttccaggcttcagagaatacggagctcacaatgctctgggaacggacgtgtcctgctggctgggtgtcagaaactccgctatcagactgattggagtggtttgactgagactctgtttaaaatagttttttaaacataggtttaaaagagtcagtattctgacaatattcatatgtatgtctagttagatcttttacacaaggtcaagtgctgtgtacaacagcaccaagttattttactcatttcatcataaacacagccagtattttctactagaaaacttcccttaccttggaattaagaaatctcagattagtgttaaatatttcaccatgagagactgataattataataaatgattcacataacattattggtatcctgacacccagtcttgcatgaaatcaactctaaacaataaaagaattaatgaaccatcagtagaggagtctctcaatcatgtctgcattacattgagaatcagcctttttaatacccctgccttaaggtcacgccagaattgtaacttaggaattcggatctatacacaatgattatttccttttttctagcaatgagcaatacttagaatttgaccctctagtgcgaagtgtgtttcctagggatttaggtattggacccatagggtggcagctgtgctgtatcctggcctgtcagcaaggcacaaaaaagttttgaaaggagtggggcctggtgggaatggctgtgagcatacagtgtctctttgccgcctgagcaaggaggctgaggtgggaggatcatttgagcccaggagagttaagtgagctatgataacaccactgcattccagcctgggtgatgggagaggaaggaaggaaaaggaaggggaaccatgttctggaagggttgttggttggttttttttccccattttaataaatattttcttagaatagttttaagatatctacatattagatatttgaatattagaacagttttagcacagaattcctacatacccggcatccagtttacccatttagcaatatgtttggttttaaagaaattctcctttggggaaaaagtgtcctcttttaattttattcccttttccccattattaacatgttacattactatactacatttgtcacaactaaggaaatgtcctgctactattaactacgctccacactttatttggatttcactagtttttccctcatgtgccttttctgatccaggacaccacgtcacagttagtcatcatgtctcctataacggcttctcagaatttcctgtttttgatgacttagacagttttgaggaatagtggtcaggtatcttgtagactgtctctcagttttggtttgtctgatgctttttctcttgattagtctgtttatggaacttggggaggaagatcatagaggaaaaaagccattctcacacactatgtcaaaggtccctataaccaatgtgacttagatactgaccttgaccacatggttgtggcagtgtttgtcaggtttctccactgtgaagttacccctaatccccgttccataatcactggaagcaagtcactaagcacagtccacacttgaggacttaggtaagctctacttccttcaggacaaagtgtcttcataaatcatttagaaatctacacaggacagttctctcctcttccccatttatttattcaatgatttatttacatcagtataaactcatggatatttatgtccatgggttacaatcctatactatattacttattgtattgctcaaattgttccagctttgacctttggagctctttcagactggctcctctgtgtatccctttgacatattctcatcttgtgttttgtgagacagggtctcgttctgttgcacaagctggagcacagtggtgtgattatagctcactgcagccttgaacttttgggctcaagcaatcctcctgcctcagcctcctgagttgctaggactatgtgtactactaagtctggctaatttaaaaaaaaaaaaaaaaaaaagttgtggagatggggtcttgctgtgctgcccaggctggttttgaactactgggctcacgtgatcccttaacctaggcctcccaaagcattggcattacaggcgtcagccactgtgcctggccctactgtcgttttttaagcattcccttactttctggcattacaagatgctctaggctcatcttgtatatattctctgctgcagccctataatttgccatttctttgagagccttggttttcttttctttcttttttttttttttttttgaagaatggtattagaaaccatgatctatttaagcagcatccttggccaaaatttaataaaacgaaaaaacaaaaagaaacctctatgatctagggactgggtattctcattgttcctggggtatcactgcttctagtcctcagtggacagcactaggaaatgtatgtgtatatacacattctaaatttgtttttacttaatagagatgaaatagagtcatgcagcttttaaatatactactaaagttattatttctttcatcacatccaatgcaaaaatttaaaaattctgcttttagatgacatggatctcattcatgaaacattttgaattgaaagaagatttatgttaagatgtaatcatagcatgcacttgtttaaaggatataggaatctgaaggagtgcagcttcttcatggtttctgagtacaaagattctttccaagtaatgttttatcccaaattatgcattaacagtgtccagcagtatgtatgttttgaataaattttataaatataaataacaaaa

SEQ ID NO: 6 - DNA, 28241 bp, Homo sapiens
  source 1..28241: mol_type = other DNA
atgggctccgagaaggactccgagtcgccgcgctccacatcgctacatgcggccgcacccgaccctaagtgccgcagcggcggccggcgccggcgcctcaccttgcacagcgtcttctctgcctcggcccgcggccgccgcgcccgggccaagccgcaggccgagccgccgcccccggctgcgcagccgccgcccgccccggcccctgccgcggcccagggcccgccgcccgaggcgctgcccgccgagccggccgccgaggccgaggcggaggccgcggcggcggcggcggagcctgggttcgacgatgaggaggcggcggagggcggtggcccgggcgcggaggaggtggagtgtccgctgtgcctggtgcggctgccgcctgagcgggccccgcgcctcctcagctgtccgcaccgctcgtgccgggactgcctccgccactacctgcgcctggagataagcgagagcagggtgcccatcagctgccccgagtgcagcgagcgactcaacccgcacgacatccgcttgctgctcgccgacccgccgcttatgcacaagtacgaggagttcatgctgcgccgctacctagcctcggaccccgactgccgctggtgcccggccccggactgcgggtgagcgcgggggcgtggcgcgggtggcggcgggctgcagccgaggggcgtggctgggggcagcagggaccccgcgtgggtgtcccaagcagggaaacccgcaaggcggcagcttcggcggggtggtaaccatcaggcaagcccagactagtggtgtgaacgcacccgacaccccgccccctgccccagggctcgaggtggctgctaagcattcggtgaggggaagggagctgtccaagttaggagacagggagaggcggtttttttgttgggggaatgccctctgtccggaggtgaggacagtatctttttttttttttctttttttttttggagacggagtctcgccctgccgcccaggctggagtgcaatggcgcgatctcggctcactgcaacctccgcctctcaggttcaagcgattctcctgcctcagcctcccgagtagctgggattacaggcgcccgccaccacacccggctaatttctttgtatttttagtagagatggggtttcaccatgttggctaggctggtctcgaactcctgacctcaggtgatcctcctgcctcggcctcccaaagtgctgggattacaggcgtgagccaccgctcccggccaaggtggggagtatctcttaatgagagtggggaggggatatttggccaaggagggaatgagaatattctgagggggcagcgcgtcggaggggtgtgtccacttggctagggacagacttagcattgcagaagaaggcgtgttctccctgacaaccaccgctgaaagttgggatggaggtgactggggaataggctctcgggtaccctgagcactatgtgttctgtgccacgctatcgggaggcactctgtcgttcttaccttgctgccttgggtagggtgaggggtagacagatatgttctttgtccagagtctcaatgggggcactgagaagaatgcccagaggttggtgtgataggagaaattgtgtttctgaacccctttgatcttgagttcttgatgacagtctttttaatgcaccatgtaggctgaattttaaagggcagtaaattaaaatatgcaatatctgcagagacataatacaccagattttgctatctgaagcattcagtggagaccttcctcgccctccccgcctttagaagtctaattgttactgtcagtatatcccatgaaggggttgcacgcaggaagaggggctcatttaagtagttgggagtcagacagccattacctgttctgtgaccttgggcagataattttattcttgtgtgtcatgttttggcgacaaaaagatgctggggagtccttgcagtgtgtaaacgtaatgctagtaaaaagttgtgtgatctttagcttcaaaggagttaaggacttttaattgtagcctatatatcaaggtggttttgaaatctccatgatgctgctggttgtctcctttcaaaaggagctgtcttagagtgtctaggagagtaagaagagttaacttctgtttttaattctgccaaacttgtttagaaatgggtgtgctatttaacctcactgagatggggtttctaaattactttgaagtgttgtggtcaaaggaatggtgtttatggtggctcactttcactttcagttaataagtatcaggaaggaccttttaggttcatggaactgtctatgtctagtgatcttactggccctctgaggttaatttatattaaagttttacagatactgttgatctgttttcttaaccaaacgaatattaagagaacacaggccaggctcggtggctcacgcctatagtcctagcattctgggagaccaaggtgggtggatcacctgaggtcgggagctcaagaccagcctggccaacatagtggtatcctgtctctgctaaaaatagaaaaattagccgggcatggtggtgcacacctgtagtcccagctacccaggaggctgaggcagaatcgcttgaacctgtgaggcagaggtgcagtgagccgagatcaggccactatactccagcctgggtgacagagcgagattctgtctcaagaaaaaaaaaaaacaaaacactgcatagttaattttggaatagtacattaactcctttctgagatgtttccttgagttctaagaaatgtggcagatcatctttctggaaaaggtccctgtttgtttttttatttttctaaagtcagtttctgtctttgctcacatcaataaaaatgcacagaaaataattttcaagcttggtgacaactctcaactatttggaagttattaaaaaattaggccatttcttattttagccaagtattatgttagtatcctccagattttatttttttaattagttagaagaatgataatcatatatatagttatatatataaacaatgtatttttttatatgtgtcatctacggacttaaggtggagtttggggaaagaagaaagctggcctctcaatacctgtgtgccaggtatatataatttaattcgatacaaccttgtgagataggtttaggtttgatatagttttataaatgaggaaactaaagtttaaggaaattgaatgacttgttcagggtcatataactagtaagtggtggaaccaggcttagaacaggggtcttaattccaaccaatgccaatattccttccattcagcccctgttttaaaaagcatttgcttgtcaacatagccgcattattgaggatgctgctgcttgggtgcatttcattaagtgtagcctgaggacaacatggagaaagccaaagatactagagtctagtttcctttctgattcctgttgttaacagcctcctacctacgttatttttcttatctgaaataggtctaattctttcctgacttgagaggtttaattaatgtttacacggtgttttgagatcttcagttgaaagtggttatagggagtaactttaaaattctgttagttgccaaatagatgcctgagttctcccttgggatgtgcctagtggctttgcatctctttttttttgagacagcgtctcgctctgtcacccaagctggagtgcagcagtggtgcaatcacggctcactgcagcctcaatctcctgggctcaggcgatcctcctgcctcagcatctcaagtagctgggaacacgggtgcatgccaccaagcccagctaattattattattaatattattattattatttgtagagatagggtctccctgtgttgcccaggctggtctcgaactcctgggctcaagctgttttcccgccttggcctcccaaagtgctgggattattgctgcctctttttaatgccaggaaaaaaaatagcttctgtgttcttactggatgtcatggttcccttgttttgttttgaacagtgttgttttgttttgttttagagacagagtctcactctgtgcccaggctggagtgcagtggcatgatcatggcttactacaaccttgaactccttgactaaagcagtactcccacctcagcctcctgagtaactgggattataggcacgaaccactgcacactgctcctttgttttatttttttaaacaaatcgttctattcttctggggctggtagaggtcattgataaacactagaagagaagtccaagtcccagttacctcctattcccatacctgaccatctttactgcccacagataaagttcttgccagccaaattgatcaggtctcccctctgccttgtttgtatgtgcatttggtagggtgaggggggcatgtgagcaatcttacaggttctgatcattagttttactataattactcataataacaagaacaccatacattcagagattcatgatttgtttacagaatatttgtaggatagagcaaagagttttggatttttcttctcttacactcaaatatggttttattttattcataaataagggaaccaatttcagtgggaaaacattcacattataatttttttttttttgagacggagtctcgctctgtcacccaggctggagtgcagtggcaccatctctgctcagtgcaagctctgcctgccgggttcacgccattctcctgcctcagcctcctgagtagctgggaccacaggcgcccaccaccacgcctggttaattttttttttttttttttttgtatttttagtagagacggggtttcaccgtgttagctaggatggtctcgatctcctgacctcgtgatctgcccacctcggcctcccaaagtgctgggattacaggcgtgagccactgtgcccggcctcacattattatttaatatactaagaacaatatggcctagtataatcttaaaacaagctgtcaaatgagataaaattagttcaaaatacaaataactgattttttatagttctttatagtcttcagactataatctcattcagacataatttcattttagtctcatccaggtggatattggcgtgcattttataaaggagaaaccagttcagagaagtttaaacatggggcctagtgtttcattgctaataattggtacaattgatcttttacgcttttgagtctctgcccaagtatgtcttttcagaaaccccgaagtcaggtaactgtaatgttttcctctcaagtatcctgttgctaatcttaaaaccctttcagaatctctaggagactgacgggtgagcaaagtaggcaacagaaaatttcctggtgtacaggggcagatcttctgtacagatgaataagaagggataaggctgtcttgacctaaattctttgtgcaggtccaccactccagcctttcattgctgcctctgtcctctgcagaatccttcctcccacctgatcccaggaaacagtatcagctattggccttcccagacaactagactggaccatcccataaacaggaagcttttttcatccctagcacatttatgagggaagatcaagcaagctctttgagcaagacaaatttcagtcagtgaaggaggatttttgctttctgaagcctccctgaacctcttctcttgatttggctccatacctcctgttccacaacttttccctgcattccccaactccacaccaccccctcctcttgtgcacgtacaccaacctccatcccaatacatctgtctcagatttgccaaagtacttgtactaaaggagaacatctgtatcactcccctgcctaagactattcattgactacctaacctataagatgagttcttattatgtctttgagaacttatttgatctacccttatcatttaagctcctttacagtttccaaccatcttttttttttttttagatggagtctcgctctgttgcccaggcaggctggagtgcagtggtgcaatctcggctcactgcaagctccacctcccgggttcatgctattctcctgcctcagcctcctgagtagctgggactacaggcacctgcaaccatgcctggctaattttttgtatttttagcagagacggggttttaccgtgttagccaggatggtctcgatctcctgacctcgtgatccacccatctcagcctcccaaagtgctgggattacaggcgtgagccaccacgcccggccatctccaaccatcttttgattttattttctatttttcactcacatcactatttcctaaggtatgttataggcattacttgaaagaaaaatgttttgtgaggaaataagcttggaaaatactgagttaaacaaaataaaacaagtttatgagtttcttaaatctttaaacatgctaatatgctaatatgtagtataaatcttcaatataatgtaatttccccaatttagatcaccaggaaacaggtttttgttttttctgtagcatctttaaggcttaactcaaactttccctaaactcctttaatagttaccatgctggcctgcctttggttagtgtccttatttaaccataaaccttatgctctgaatagattgagagctcatgtctctagactaggatatctatattccaaccatttctacaactctgtgtacaaagtctttcaattaggctctagaagagtgtggtacatagatgaattttgatgaaaaagataagaaatatgagcagcatagttctcagaggaagaatagagatgaaagagataagcaagaatagtatagacaggtgatcattcaattcaacagacaacttttttttgagatggagtctcgctttgtcgcccaggctggagtgcagttgtgccatctcagctcactgcaacctctgcctctcgggttcaagcgattcttctgcctcagcctcccaagtatctgggattacaggcatgtgccacaatgtccagctaatgtttgtatttttagtagaaacagggtttcaccatgttggccaggctgggcttgaattcctgacttcaagcgagccacccgcctcaccctcccaaagtgctgggattacaggtgtgagccaccacacctggcttcaacagatactttcagaatgatacactgttgaaccctgggtgagtactgggtatttcaaaaagaacttagacatggttttcttgataggaagtttcacctggtagaggagacagataattgatacatagatagatagaaaattattcaaatgtcatatgataaatactaaagaaaatacgggtgctcttagatagatgaaagaacaatagaatttgcatgatggtttcaagaaagacttcacagaggagcaggcatggtggtgtgcacctgtggtcccagctgcttaggaggctgaggtgggaggattagttgagcccaggagttcgagaccagcctgggtaatagcaagaccccatacctgggaaatgactagagatcaacctgaaaacgtggactggattcaggttgataggcctgtgtaagccatggaaataagttttgggttgaagcactttttttcttttttctttttctttgaaggattttaagcaaaagagtaaccttccagaatggaatttggatggagtggggaatagggagagcagataaggaggctcttggagttgtctagcctagagatgggtcttaaatagggcaggaaaaatgaagatgttaagggtacagttcattgtgacaagttggcgcatgtctaccaccctgatgcctactaggggtctatttgtaaatgggtagcctagttatgttacatgacttggggatggaaagtacagacataatataggaacacatttctttaaccactgaagtctattggagcataatcaaatttatactaatggaaatctctttccagggctgaagctaagtaatgctgtggtctagcttgtcactttatgaagtttctgaagatttaggaaattaataaaatgagtaaaagttgtatgaacttaagcagcaggggctggggtgggcggtctgtagtctttttcttttttattattttttatttttttgagatagggtttaactctgtaactctgttgcccgtgctggagtgcagtggtgcaatttcagctcactagaacctcaacctcccaggctcaggtgatcctcccacctcagcctcctaagtagctgggactgcaggcatgtgccaccacacgccaccgcgccccaccacactcggctaatttttgttgttgttgttatttgaagagagagtctcactctgtcacccaggctggagtgcagtggtgcaatctcggctcacagcaacctctgcctcctggattcaagtgattctcctgcctcagcctcccgagtagctgggagtagctgggactacaagtgcacgccaccatgcccagctaatttttttgtatttttagtagagaggggttttgtcaggttggccaggctggtctcgaactcctgacctcaggtgatccacccacctcagcctcccaaagtgctgggattacaggcatgagccaccatgcccggcctaatttttgtgtctttcgtagagatgggatttcaccatgttgccctggctggtcttgaactcttgggttcaagtgatcctcctgcctttgcctgacaaagttctggggttatgggcatgagccactgcacccagctgtgtctgtattcttcacagcatgtaattttctacacctttcttttagcttctgattagcaagcctgactgattggttaagctaaaagagcagagtaggagagatgcaccagcatgggacgtggaagagaaggaacaaagtggacagggcagattgggtttcaaggatgaggtattttcttttcttttttttttttttttgagacagggtttagctctgtctcccaggctggagtgcagtggcacgatcttggctcactgcagcctccacctcccgggctgtagccgtcctcccacctcagcctcctgagtagctgggactacaggcatgcactacaggcatgcaccaccacgcctagctaatttttgtattttttttttttgtagagatggggttttgccatgttgcccagactggtctcgaactcctgagctcaagcaatccacccaccttggcttcccaaagtgctgggattacaggtgtgatccaccatgcccaggcgaggttttttttttccaactattcgggaagaagattaccgtattcagaacttaggggtttaccactaaagtgggtttatatgaaattttaggattaggttatagtacctggcatataataagccaatagatacatggatacattgaaaagattgctttagagcagagtgatggcctaggagaagacctagaatgtcctagggaaggtcaaacaaccaaaacaagagagggtctctgtcattcatgcaacacaggtattttgagcatgaaccagtatactagactgagattaaaaagtggatgatatgtctccttaagtccagtgtggtttggaaggcaagcatataaacagttagttacattataatgtaagtgttataaaataattgtgcacacccacgaagtaggcaacgagctgcctagagaggttaagtatattttacagagaaaatgacacctgagttggttcttaaatgggtacttgtcagggcaagaagtaaggacaagacatttctaggtagaaggaatagagtatgtaaaagccagaaagtaggacagagtgtacgatgtttttacgccatatatctttgaggacaaggtctcacatgcagttttagaacgtgtttagctacgtttgaatgtgacaagtacctatacctccatttggtggaatagaagctaaggtttggagattgtttttttttttttttgagatggaattcctcttttgttgcccaggctggagtgcagtggtgtggtcttggctcactgcaacctccgcctcccagtttcaagcaattctcctgcctcagcctcccgagtagctggattacaggcatgcgccaccatgcctggctaatttttgtatttttagttgagacgggatttcaccatgttggccaggctggtcttgaactcctgacctcaggtgatccacctgcctcggcctcccagagtgctgggattacaggcgtgagtgactgcaccaggccggtttggagattttaatagcttcatgtcatgcagcatgagtcagaggcaagagctcagaccaggtacccaaaaacaggaatgccaaatctcgtgccctgagtaattctgtgtcgtagtaatagattgctgtggattcatgagtaatttggggttattttacttccttggcaccaaattacacactcaaaattgacattgttgatcctatccaatgttcttctttttcaagaaaaaaaaaaaagtgggctgggcacggtggctcacacttgtaatcccagcactttgggaggctgaggcaggaggatcacttgaaggccaggagttcgagaccagcctggccaacatggtgaaaccccatctctactaaaaatacaaaaaatgtagctgggcatggtggcgggcgcctgtaagcccagctacttgggaggctgaggcaggagaatcgcttgaacccaggaggcagaggttgcagtaagccgagagcacgccattgcactccagcctgggcaacaagagtgaaactccgtctcaaaaaaaaaaaaaaaaaaaaaaaagaagtgggggctgggggaatgttaataaacatttacttctgccatgtgaggtaggaatggatgatgaagtgttcaaggctccctactggatgtccacttaatttgtatctttagaagttgacttagtgcttttctgaggtcatccagtaactttcccatttaatgcaaaataacaagctagtcactgtcttgaggagacacgttgtttatctttagtagttattttgcagctaggtggggtaaatttgcccagaactcctacaggatatgaatcatttgcattcatagactgacctgttctcactttgttctttctgaaaagagttttaatacagcctgtattatataacataggggatacattgtcatttatattttcagcatcattctcaagtcaatttgcagactctatgataaacctgagaacttgagttgctatgattaacatctcatgtacattcaaataaacaagcaaactgtagaataaatcccagaaaatgttattagctttttgtacacgttatttgaggtctttgaatattgcgggagagtattggaatagaggacagagtgcagatggcaacacggaaacctgcaattactgatgtttttaaaaatgtgtgtcatagaccaagcttggtggctcacgcctgtaatcccaatgctttgggaggctaaggcgggagggttgcttgaagacagaagttccagaccagcctgggcaacatagcaagaccaaccctgtctctacaaaaaaaaaataaaaagaaaaaagaaaaagttagctgggcatggtggtatgcactggtacttggaggcctgaggtgggatcacttgagcccaggagtttcaggttgcaatgagctatcatcacaccactgtccagaagctgggcaacagagtgggaccttgtcttcaaaaaaaaaaaaaaaaaaaaaattgtgtgattaactttcataactttccatttatttatttattattttttttagacagaatctcactctgtcacccaggctggagtgcagtggcgcaaacgtggctcactggagcctcaacctcccagcctcaagcagtcctcccacctcagcctcccaagtagctgtgactgcaggcctgtgtcaccatacctggctgatttttttttttttttgagatggagtctcacactgtcacccaggctggagtgacacccatggtggcgcaatctctgctcactgcaacctccacctcccgggttcaagcgattctcctccctcagcctcctgagtagctgggattacaggcgcccgccaccatgcccagctaattttttgtatttttagtagagacagcgtttcaccatgttggccaggctggtctcgaactcctgaccttgtgacttgcctgcctcagtgtcccaaagtgctgggattacaggtgtgagccaccacgccaggctgttttttttttttttttttttttttttttttaagagaaaaggtcttgctgtgttgcccaggctggtctaaaaatgctggcctcaagcgatcttcctgcctcagcctcccaaagtgctgagattacaggcatgagccatctcacctggctaaaatgttattttatacaagtattatatttcttgttagagtaatctgagcgcttaattgacatatttggaattaatcagaaaggctaatagttatataaatatattggattgtttgtgtgagactaattcttggtaaatgaacatgaactacaagaaatggtcgacattagtgctgataaattctgaatctttacatgaagaatatgtgtcacagctgagtgcagtggctcacacctgtaatcccaacactttgagaagccaagacaggcaaatcaccagaggtcaggagttgaagaccagtcttgccaacatggtgaagccctgtctctactaaaaaaaaaaaaaaaaaaaagccgggcgtggtggcgggcgcctgtaatcccagctactcgggaggctgaggcaggagaatcacttgaatttgggagaagattgcagtgagccgagatcacgccactgcgctccatcctgggcgatatagtgagactctgtctcaaaaaaaaaaaaagaatatgtgtcagaagagagaaagggaggtatggccttaatgctattttaatttataagatagaggcctggtattcttggattctggagcctatcaagacatttcaaggtataggtttgaattgaaaaagtatggaaagataagatgagctttcaagagggatgctgatcataagtctttagggtttattgtctctgtgactatggtcagaccagcttcactgtggaactggaacttaagaatgaaaaaggcagcatgctttccaactgcctgactgcttgttggcctcaccggtgggagctccagcatctcctttgctcgaaatggaccccaactgctcctgtgccactggtggctcctgcatgtgcgccggctcctgcaagtgcaaagagtgcaaatgcacctcctgcaagaagagctgctgctcctgctgccccgtgggctgtgccaagtgtgcccagggctgcatctgcaaaggggcgttggagaagtgcaactgctatgcctgacgtggggacagctctgctcccagatgtaaatagagtaacctgcacaaacctggattttttaaaaaatacaacactgagccatttgcttcatttctttttatattaaatatgttaatgacaataaaacaatttttacttgaagaaaaaaaatgaaaaaggctgagtgcagtggctcacgcctgtaatcccagcactttgggaggccgaggagggcggatcataaggtcaagagatcgagaccatcctggccaacatggtgaaaccctatctctacaaaaatacaaaaattagctgcgcatggtgatgcatgcctatagtcccagctactaaggaggctgaggcaggagaatcgcttgaacccgggaggcggaggttgcagtgagccgagtcgcgccactgcactccagcctggcgacagagcgagactccatctcaaaaaaaaaaaaaaaagaatgaaaaggtagcatggtggctcatgcctgtaattccagcactttgggaggctgaggcaggctgattgattgagcccggaagtttgcgaccagcctgggcaatggggcgaaaccccatctctatgcaaattacaaaaattagccaagtgtggtggtgcgcacctgtagtcccagctactctagaggctgaggcaagaggattgcttgagcctggtatgcggaggttgcagtgagccactgcattccaccctgggtgacagtgagaccccatctcaaaaaaaaaaaagaaggaattaaaaaataaactttagtttttgccatagctctttatttcactaatgtcctcttccttcgtataaacaaatactaatctctctaaatatagcaaactatcaaaaggaaatagttttgtaccctgttatttatgaaacttattatgacaaactactcctaaagcagcttcagctatgattgaataaatgctggaaatccaggataaataagatactccacctccactttttaaagtaaataaatgatttgtgtttttggaatctcaagaaatttatagccaggcatggtggctcacgcctgtaatcccagcactttgggaggccgaggcgggtggatcacctgaggtcaggagtttgagaccagcctggccaacatggtgaaaccccatctctactaaaaatacaaaaaaaattagccaggcgtggtggcttgcacctgtaatcccagctactagggagtctgtggcaggagaattgcttgaacctgggaggtggaggttgtagtaagccgagattacaccactgcactccacaatccagcctgggtgacagagcaagactgtctcaaaaaaaaaaagtttactttctcacatgggatatattttacagttggtcaaatgtgcttgtgtgtgtatatgtgtgtatgtgtattcttttctctgtatcatatgtgatagtggggtagtgccaaacattgttaactctgatgaataatgtctcttttggttagatcattcttaccttactggtatctcttactgtttccttacctagttatgctgttattgcctatggctgtgccagctgcccgaagctaacttgtgagagggaaggttgccagactgagttctgctaccactgcaagcagatatggcatccaaatcagacatgcgatatggcccgtcaacagagggcccagactttacgagttcggaccaaacacacttcaggtctcagttatgggcaagaatctggaccaggtataagttggcattatctcattgtctctttatttggtatttcatgatgtgagcccatagctgaaagaaattatcttattgtataacccaagtactccaaaggatcagagagcagaaaatatcatttgataatactttcaatattataataaagatagcacttccctctctgaccattataggttatccaactatataaaattgaaatgcaacaaaattgaattatgtagttcctactttcttagtaatatgtctcagattggagagcaattagttcattttgttttgctaggggctttttcaaaactttcattgtgaacagaaagacatttaattagtattaaacctgtgctgtttgccttcaagctgacttaagtgcctcactgcctttggaagtagagtacagattgaagaaaaggaaacagtattagtatagattaatgattaaccttaaaaggaggaatgtcacacattcagctccaaccttggcgagtcagaggaaacctattttaaaatgtcagtggatttattgctttgtacttttattttgctgatgtcatttgggagaggctagtaggaaagattttgccattcactttttcctggcacagcataatttcctaaattgtcattttattaggatagttcataacttgctctgaaaattaccaagtatatggtagatagcatacccagttgtttttaggttttgaatttgaaagtatcatgggaagggattgtgggctatgttaacagcaaatcacaatgatacatgttgaacctgaaaaataaatttcccaaactaaagtttttaaaaatgtaaagctaattccaggctgcaggctattctttctgtaggattcttcttttaaatctaccagcctatcgactggtagaaatttcatttttcttggaaacatctttctccctaaggaaatctccttgctagaatgtggttcaagtgctgtgtaagatgccagttgttgggataggcagctcaataagagacaggattcattttatgaaaattcctgaggtctagacatagccaaccttccagtaaagtgggttgtacaatttggagtgttcagtgaagagttcttgactgctgcctcatttcttatatatactcctaggaacaattaaatcaaactggatttaactaggggtattttttctacccattcttcccccactcatagcagatgacatcaagccatgcccacgatgcagtgcatacattatcaagatgaatgatggaagctgtaatcacatgacctgtgcagtgtgtggctgtgaattctgttggctttgtatgaaagagatctcagacttgcattacctcaggtaagatgggaaatgcatccattcctttcgtagtctcattctcttactgatttagggaaaaggatgtcaaaaagacacatccgttctctcattacaggtttaaggaagctgtgaaaacttcttctgacatgctcctctaatcatgttttcaccagctactattctgtttctacctttctttgcttgccatattacaggtagtctggacttgctttttcccttttgctgtcttgcctccatacttgttcatgttctttcctttgcctagaatgctttctgcctaccttccagtatcctccttttatctcaacttgttcagttcttatcttttaagagccacttaaatgcctttcatccatgttgcctctcctttttccgcctcattctttgactttcttttatcttttgtcataaatatcgtcagtactttacacttcacgtacctatcttatcttactaaactgtaagtatcttgaggctagagttgtgacctttttacagttttttgcatttagtgagttcccaaggaattcattaagtgaattctttttttttttttttttaagacagagtttctctctgtcgcccaggctggagtgcagtggctcgatctcgactcactgcaacctccacctcccaggttcaagtgattgtcctgcctcagcctcctaagtagctgggattacaggcacctgccaccatgcccagctaatttttgtatttttagtggaggcggggtttcaccatgttagccagcctggtctcgaactcgaacctcaggtggtccgcctgcctcggcctcccaaagttctgggattacaagcgcgagccaccgcgcccagcctcattgagtgaatattaaaatgttgtggaggagttaatatttacaaacaaaatgtttgctaatatttacaaataaacaaaatgtgttaatatttacaaacaaacattcattgtgtaaatgaaacacaacaccttcattgccaatttgtcgaacatttgagtacttactgtgtgctagtcattggggacataggggtgagtaagacatgatccctattttcaaaattgtttatcccttctagtggagaagatagcacaaagagaatgggcaaaaatggttgggcacagaagggctgactgtaaaagtagccaaactcagaataccaaactgatagaaaggttatgatgaggtctttttatatcctctcccacgaacatggtttgcagtatctattaggtatggtaggacatatgccaagaaaactacacaaatcagagtgttcattagtgcagggtgcagtgtgtctggatgggatgtcaagtgcataaggctatgcagcatcccaagtattgtcagtcatggaagctagatcagttttggtgggttagggaagacagaattcagcagagaagaatggaaaaggaatttcaagtctggaagcctgtctttacaacaacaaccaaaaaagttaaagagcccagagctctaatagtctggccttgtcctttgctctcccttgtgtaatgtattcatttcccataaactcttctgttaatccttactgaaaagaaggctgttgctgttatcaagccctatgataatactagctgtatttgtaatgttgacattaacttcagtctgtttcccctgcagcccctctggctgtacattctggggcaagaagccatggagccgtaagaagaaaattctttggcagctgggcacgttgattggtgctccagtggggatttctctcattgctggcattgccattcctgccatggtcattggcattcctgtttatgttggaaggaaggtaagaaagacatgctggtttctgtgcttgtttcaactttaggttcgttagtaaaggtttgagggaaatgggaaggagctatgtttcagagctgcctgaaaaccagctggttcttagataaaaataaccttactttcttaaatggattttcataaacccccatgagatctgaaagttcttattaacatcctgggcctggcttgtctcagtgacttaaaggtagaatgctgggccaggcatgatggttcacatttgtaatacgtggcctagcactttgggaagccaaggcaggtagatcagttgagcccaggtgtttgagaccagcctgggcaacatgacaaaacccatctgtacccaaaaaaatagaaaaattagctgggtatggtggcatgtgcctacagtcccagctactagggaggctgaggtgggaggattgcttgagcccagggacgtagaggttgcagtgagccaagatcgcaccactgcactccagcctgcatgacagactccaaaaaaaaaaataaaagaagaaggtaaaatgcttacttcattctgctggagttattttgtctctttttggattaactttgcctgtattactttatatcttccaggtctgagttaggttaaaatttgataaagatgcctatttggggtagaggatatgttttaatatagataacttacaagtgaatattcacctgtcctttttttctctggcaaaagattgatgtcctaacctgctgacctggattttctttttttattcttagattcacagcaggtatgagggaaggaaaacctccaaacacaagaggaatttggctatcactggaggagtgactttgtcggtcattgcatccccagttattgctgcagttagtgttggtaagctagtcaggaccacacctcttctctctcagctttctgaccatagcagtttagccagatggccagatgtttctcaaagactcctacattttatgcgaacccaccttgatagtaaattctgttaggcaccatgattatgattatttttaagtttttcaagcacaccaaattatcagagtgtgcaatcttttgttcttaagttagtgcctagaactccatttggcacatagaaaaggttgaattacagaaacttattttaagccctagttttcacctttcatcttccttctctacttgccatgaaatccacaaaacaaaattacttttgttttgatttgtttaatgcttcacattactttgggaggcataagagtttgttttagaataataatagtgtaactaacatttaatgtggctcttcatgtgccaggagtggttctgagacttttgcatatattaatttatttaatcctcacaatccttacaaaaggaagcacaattttaatagaaaggtgcagtaattggctgggcgcagtggctcacgcctgtaattccagtgttttgggaggccgaggcgggcggatcacgaggtcaggagatcgagaccatcctggctaacacggtgaaaccccatctctactaaaaatacagaaaatcagccgggtgtggtagcgggtgcctgtagtcccagctacttgggaggctgaggcaggagaatggcgtgaacctgggaggcggagcttgcagtgagccgagatcgtgccactgcactccagcctgggcaacagagtgagactccgtctcaaaaaaaaaaaagaaaggtgcagtaattttcccaaggtcacttagctgggacatgaatcaagttaatctgccttcagatcctgttctcttaacagctaagccattctacctcacacagcagtaagattttggaattaacatcctgaggagatcctaaactccaagcagtagtcacttatttaatatttgattcttgattggctcttgattgggttagcatttcagcagtgattagaagaggggaaaatgaaagcaacatatatttactgtgcaaaacacagtacatagcattctcatttgattattgacaaccctgggaagataggtccaaggttatacagctagtaaatggagccaagaatctaatccagacctttctgatttctagcctggtcatcattctgttacaccaggccacctttttgggatagccactttctgtcttcctttctttataaagtggtttgtccatgcccagactgggaagaagaattcagggcacttgcaacctaatagccagctgacatgtttccttctcttcccccaggtattggtgtccccattatgctggcatatgtttatggggttgtgcccatttctctttgtcgtggaggcggctgtggagttagcacagccaacggaaaaggagtgaaaattgaatttgatgaagatgatggtccaatcacaggtaaaaagcaggatgtttatttccatttgaatttatgatatacaagataaaaatcagtaaaattcagcgcattttacagggagattgtcattggattactttggataatgagctttgtagggggtaaagtatttttagcttttcatttctttgttccaaagttattaggttaattcccctggtacttgcctctgtgtggcaggtacaaactagtaggaatccaagtaactccaagtatgctggtagtagtagtgattataataacatctttatatctgcacagtacttgataattttcagagtattttacacaattatctcacttgctttttacaacaaacagctctctgacgagggaggatggagctgttatccccatttaaatgggaatttctttttttttttttgagacggagtctctgtcacccaggctggagtacgatgtcgcgatctcggttcactgcaacctccgcctcccaggttcaagtgattctcctgcctcagcctcctgagtagctgggactacagcaacgtgccaccacgcctggctaattttttttttttagtatagacggggtttggtgtttcaccgtgttagccaggaagatctcgatctcctcaccccatgatccgcccaccttggcctcccaaagtgctgggattacaggtgtgagccaccacatctggcctaaatgggaatttctttaagctttcatcttactatctattaagagcttcacagagctgagactagggcaagtcttctgacttttactttaatgtggtttctactcgtagtaagtaacgtagggcacaagtaacgtagaaaaccccaaaggtttttctagcttccttttttcttttctttttttttttttgagacggagtcttgctctgttgcccaggctggagtgcagtggcatggtcctggctcactgcaggctccggctcctgggttcgcgtcattctcctgcctcagcctcccgagtagctgggactacaggcacccgccaccacgcccggctaaattttttgtatttttagtagagatggggtttcaccgtgttagccaggatggtctccatctcctgacctcgtgatccgcccgcctcggcctcccaaagtgctggaagtacaggcgtgagccaccgcgcccggccggtttttctagctttctactagaagcttcctattaaaatcagcacatgacccaaacatattttttaaatcttcacgtttggttacatggaagcaacagtgtagtggaaagaatagtggccttggaatcagagttatagtttcatgtaactaccatggccttggacaagtcatttagttttaaattttagttttctcatctaaaattgaggctattaatgcctagttatttggaggattaaatatgaacatatgttaaaacacctgatatgtggcgactgcacacagtacctgttcattaagtaaatacattagttctctgaaaagtcattgcaggaaaatgcctactgactgttttgatgctctgctgtcttgaattggatgtttggttctatccccagtggcagatgcctggagagccctcaagaatcccagcattggggaaagcagcattgaaggcctgactagtgtattgagcactagtggaagccctacagatggacttagtgttatgcaaggtccttacagcgaaacggccagctttgcagccctctcagggggcacgctgagtggcggcattctctccagtggcaagggaaaatatagcaggtaaacaaatagataatttctgacagaaatggttagaattataagaagtaacacattgagccatttctctgtgccaggcttgtgccacgtatcatcttattttgatttaattgtcaatggttttgttttgttttgtttttacttttttatttttaaagacagagtctcactctgtggctcaggctggagtgccatggcgtgatctcggctcactgcaagctccgcctcctgggttcaagcgattctcctgcctcagcctactgagtagctgggattacaggcacccgccaccacgcccagctaattttttgtatttttagtagagatggagtttcaccatgttagctaggatggtctcaatctcctgacctcgtgatccgcccgccttggcctcccaaaccgttgggattacaggcatgagtcactgcgacaggcctttttttttttacttttacaaataggaaacaagcttagaaaaaaaggttacgtcagttatgcaaagttcattgttctttccattgcaccatagctgcctctatataaagaataatcctgacttgagattcccccttgactgcctgaggctgcctgcttcaggaagggagagtaggcatttttatagaattcgtaaaatgctctccgttaggcttgtcattggctttcagtagcatttatgctgtatcatggcttatttattttattttatttttttgagacggagtcttgctctgtcgcccaggctggagtgcaatggtgcaatcttggctcgctgcagcctccacctcctgggttctagtgattgtcctgcctcagcctcccaagaggctgggactacaggcgtgcaccaccatgcctggctaatttttgtattttcagtagagacagggtttcatgttggccaggctggtctcaagctcctgaccttgtgatccacccgcctcagcctcccaaagtgctgggattacaagcatgaaccaccacacccagcccatcatggtttattgatagtgggctttggggatttttttttgttttttttctcactgtgtcatccaggctggaatgcagtggcacaatcatggctcactgcagcctcaacttcctggactcaggcaatcctaccacctcagcctcctgagtagctaggactacaagtgcacacaccacacccagctaacattttaaattttttgtagagatggggtcttgctcggttacccaggctggtcttaaactcctggcctgaagccatcctcccaacttggctcccaacgtgctaggattataggcatgaaccattgcccccagctggtttagtgatactgcaatccttattacctttctatttccatttgctagataaggaaaatcaattctatgtacttgtgttgaaaatatgtaaagctttgtaactaaaaagattgtgacttgcttggtcatttcactagttaggcagaccagagtgtatattttcagaggagcataacatgttgcctgagaagcagttgaatgcaacggagaagaaaggcctagggaggggtaaaggtagaacaaagcaggataggaaggtagaggagatggttgccttcagctatccaaaggaccttcaactgtgaaaaggattagacttctatgcctcataccaaaaggtagattaagatgacttggcagaagctaaagggaaactaattttggttcagtatagagaatatagggaaaagcaacatgaaagcccaaagaggaaaaaggctactttagtagatactgagctgcctatccctggaaatgtttacaatgagaccagatggctatttggctataagaaggattcaagcaacagatggcaggtggactggatctcccacctgagtgcctgtcaatcacttgggagcctcttaaaaatagacttcagggacccatcccagaatgagtagcttagaatttcctggagtggcacctagggggtgatccgtgttttgcaaaagctccccaggtaattctagcacagccgttgcatgaaccagcatctgacaaccacctaagtaggagccctttctgaaagactcttccaactcagagtgattctgtggcagacctgaaactagaagccaggtctctgacactgtgcactttccattgcattccctcatttccctgggccttggcacatttttgaagggcacctgaagctggagcagcaaagcaaaggctcaggcagtaggatggaagctgcttgaatgtgcagctgcaggctgctactgacccgtctgtgcatctcatgactctggttgtctcttatcaggggatcccgcccccacatgctggcatattcactgctgtgctttcttaaaaccaacacccctgtaaataagcagacagacataattggagactgacttgctgaaactgcagcttagccagtccagctgttctagttctgtgaaagcctttattttataggaagtgaatgagtcagatgggtttgactgtgaaacccattataaggaaatacttaactgtgcaacaaagtgatgttggagccaagaaaggcaatagttatgggctctgagacactattgggaaagtttgctgctccaagaggagggaagaggttggctcctgtatgtccttcagtctcattccctggaggtaatttgattgttaaatgtttgatttcctattatgtgcaaggcagggaaggtaaagtgtgtatgagttgtggtctctccttttgtggagttaacagacaagtgagagatgcataataataagtaggcagggcctgcgcacgcctgtaatcccagcaccttttttaggtgggtgatcacctgaggtttagagttcaagaccagcctggccaacatggtaaaaccccatctctactaaaaatacaaaaattagctgggtgtggtggtgggaacccataatcccagctacttgggaggctgaggcaggagaatcgcttgaacctgggaggcagaagttgcagtgagccaagatcgtgccactgcactccagcctgggtgacagagtgagactccctctaaaaacaaataataataaataagtaggcaggtgctgtgggagtacttagcaagaagtgaatggtttgctgggataatgaggggaagtgatagttcctttgttgttaaggactgagtataagtttgtctggtagagaaaggaaatttctagagagacagaatagcatgtgcaaagtcatggaagtataaaatgtataggtatttaaagaaagaaagaattcagagtgactatgatttcggatctatagggagtgatagaactggacagagagcttcctggcagatcaggaagaccttaatgcctgttggcagtagggagccaagagttagagaattgttagagtgattgggtctttattcacactggcactgttctagaggttgtttgacttggacttaagggctactggagagggagcccagttttagtcatccaggcaggagatgatgaaaacctgaagttcagcagtagctgtggggatagaaaggaggggacgatttcaatagatatttaagagaaaaaatgtatgggcatctatttgcgctgtttgacagttggagaagatcagacagacaaccacaatttgcaagagagtaatggaagagatgtgtgccaggaagcagactgtcttggaatacccaggtctcatattaacttgaacgtcccctctttacacaggttagaagttcaagccgatgtccaaaaggaaattttccccaaagacacagccagtcttggtgcaattagtgacaacgcaagcactcgtgctatggccggttccataatcagttcctacaacccacaggacaggtatgtgaacagtcagatgtccaggagaggttgcattttttcgttgggtactaggtcttcagaagttcaatgcctcatgttagggctgtatgtaccatctcctgggatatatagtgtaacctgtgaattcatttgagcaagttcttggtacttgagtgtttggcatctcttgattcttcttgttagcgcttgatttttagagatttcttttctttcttccttttatgtattttttcttttttttttttttttttttgtctttcttggctattgcaacagtgtataattacatggaacttaaagagctagattgatgttcattgatgtcttcaagtctagggtttctgcttgccctttgcttgataggattcccatagcttctttctctttcattttgagaaactggtgtatctgggatggtgtgattgtggtactcccactagtaggtattctggcttcttctacttgtggcatggtagtaaaaagcttttacttttctattttgagtaagctagcatggggctctgacccttagttgaattttggaagctctttctgtatgtttaaagagattggctgagatacacgtgtgtgtgcatctgagcacacgtgtgcatgtatagttaaatcagcaaaaaggatctaattactcttctccatctcatttatttttatttttgtttttttagagacagggtcttgctctgtcaaccaggctggagtgcagtgacacaatcataactcactgcagccttgaactcctgggttcaagtgatcttcccatctcagcctcccgagtagctgggactacaggcacgtgcctccatgcccagctaattttttttattttagaaacagggtctgactttgttgccctggctggtctcaaactcctggactcaggcagtcctcacacctcgacctcccaaagcgctggggttataggcatgagccaccacgtccagcctccatctcatttgagtgttagattaaaatgttatttttgttaaaagtgagctctagttaactgttcacctatctttttgaaattcctaatcctgaacccatgaactgcttttaccaacaggtttagcatgatccatgcatgactcagcaaagtggattttgtctccacagagaatgcaacaatatggaaatccaagtggacattgaagccaaaccaagccactatcagctggtgagtggaagcagcacggaggactcgctccatgttcatgctcagatggcagagaatgaagaagaaggtagtggtggcggaggcagtgaagaggatcccccctgcagacaccaaagctgtgaacagaaagactgcctggccagcaaaccttgggacatcagcctggcccagcctgaaagcatccgcagtgacctagagagttctgatgcacagtcagacgatgtgccagacatcacctcagatgagtgtggctccccccgctcccatactgcagcctgcccctcgacccccagagcccaaggtgcaccgagcccaagtgcccatatgaacctctctgccctagccgagggacaaactgtcttgaagccagaaggtggagaagccagagtatgaagtggaatgaatgctcctgttctgagaagcacacttgtaactgcatcttttggaatttttttttttttttttccaaggggtagagatttatgtattttatttcacagattctctggtcacaggtttttgcccagggaaattctgagaaattcacaatttcttaccagataaaacatgaaaagtttgccgttagttcccctcccctcccctccctctttttagttttaatttattggttaaactgatggcagcaatccatgaggtgtgtcaaagagtgtacatatgtatgtgtgtatattgaatgctaaacatattactgaaagacacattttaataaagatttctgtcataattcaactta

SEQ ID NO: 7 - DNA, 89129 bp, Homo sapiens
  source 1..89129: mol_type = other DNA
atccataatccagcgatgctgcagctgtaaaagcattaatagaaaatcaatccacaacctcgcggggcagcgatcgtcgagcgccgtttccaggctgccttccctggggtcgggagcggccccgctccccccgtggctggcgcggaatgtggtgatccgtcccggggcggggatgacttcatgcagccggagctccgcggcgggagcggaggctgctgctggcaggtggggcgcgggccggcgcgagctgaccgagcactcggcgggcgcggcgggactgcggcccgtggcggcgtgcgcggggacctgcgctgactaggtccggggaaggtaagcagcccggcaccggtgcgccctggccgcactgcgtggagctttccgcttggttaataatggggtttgcagcacggagggaagaaggggagaaccccgctgcattctgcaatgagaaaaggagcaacaactaggatggaaatgttgggcggccaagtgcagaggttggaggagcagtgttactgggcaaacaaagaaggcgttcttgcctctatactcttttgaacgtgatctaccatttcagtgccagattcgcgtagacagtgaagaggactcaaaatttaaaataatttgagttactcttttgctttctgtgccttttaccttcgcttgagtattttgaggatttggagcagtaggtccctggcagcagcctgaggtaatcagaaatcgtccctcttcctgtagtccttggtcctctccctttccagttatcagaatgggtctgtgcccctctcaatggcaaaacacctgcttcaagactgaacctttagaaagagcctctatctggaggggaaacttctcttatctcctggagttcagcttgggttgagcagcacttgacatcgcttcttccttcaattgccattttctctgtcaatcatttcattgatctttttcggagatgctgtgcccattcacagaccaactctcgtcagctcttatccaccacctgggttccatgactgattttgtcaaggtcccaaaaagggcattgcctcacacagatttcttattcggtattctccctgtatactgttacctgtgtccttcccccaaatgcatggaatgaaatatcctgcttgtggccctgtaccaacatgttatcccattaactcccttcgctgtagtcactgtggctacttgaaagctagagaggacagatagaatctactggagtgtgagggatgttccctatgcataggcataggtagaagtaaaaatgtgaatgccagtccatccagtttttcttgaagcaattttagtccagttggattttgagacagctagctgttaagatttgggacaaatcctttccaaaaggcagaggagtccgtttgcctctaggattcctcaagaacctcaaaagagtttccagtgaggttttcctcgtaggcagtcagaaagccaatggagctgcccaatctaagcctctggttgagtatcctctagtttgtcttgccatttgcaggttcctatccctcgtcctaggattttccccacagaccccttgctactgagcccaagtgcctatccttgttgccacctagagatgtacatttgaataatatgctgtgaaatggttaagatggctgttatggggattgcaaacgtgccacttcaccaacagagaacagttgcaataagccagattgtggggtatctgtgtgccaatgttctatttaaaggaagatctgttatctttaaacttaaaattacagagactgtctgactcaacagccatgcaattttattttagtaaattaaattagaagatcaatgaaaaagaggggcagagttggtagcttaaaattttacctctttctttcctcttcaaatattatttttaagcaaagacactagtatggaaaatcgtgttaatcatattatatatcattattgcctttctattacaaatttcgtttttacaaaatgcactttagaaagatttgaatttgtttctttgtctccatcttcagtatatgaggcatagggtgagggtgtagggggtgggcaaagcccactactgagtgatccactccaggaactgccccttggggtcttaataaccttatgttccttttttgttgttgttattatgtgttaaacagggttttggtttgaaatattaacttcttgagattctagaatttttactcagtcacattaactatgaggtaacaaagaacaagatcaacaacaaaccctgtattctaccaccttttttctactattaaaatacttaaccatatacatcattattctgaataatactaatatagaataataatgaattttaatatagttattctaaataacctaaggtatatgaaatacagattagtacaattgatcttagaaatacaatgcagtttctgtaatgttgacagtcacctttctgttgaagagcaagtgcgtgagaatatcctaatgatggttagaaattcgaagtgtctatcatttagtttctgaagaaactaaactctttggcaagaaataggttcaggattaggagactggtgctgcctaaggtggaataatacttgctagtgattttgcaggtgagttgaacccactaagttatggactggagttggagaaatcttgttgagaagaaagaaaacaagttagaaaatttaattttcattttagtacaactgaggaagataatcaaactgaagggattcctgaatttggactttgttgtgtttaaacaagtttgaggaaagtttctaaatttagaaggctaagcagaaatatatgtatgattttatgtctgaaactgatttatgactttatatcctttccttaaaatgtttcctagggagaggaaaaactaattggctggtgttcagaattgaaagaggaatgaaaaatggaaggacgtgcatgattagatgctaaatgattagatactaaatgaactgcaggcacttttgtgtttgacaagatagaactgaagtcagtctactgctctccaattgtgtaaaaaaaaaaaaaaaagttttgtctgctagacagtgttaccagatatttagagagtaaaaatttaggagttaaagttgccctcttctaacaaaatatctttttctggtgctgcattactgccattaactacaattgaaatagccttaagatttgaggctgaggcaggaggattgcttgagcccaggagtctgaggctgcagtgagccatgatggcaccactgtacttcaaccagggcaacagaatgaaaccctgtctcaaattaaaaaataaaaacttttttaaaagttcagaaatgttgaaatggaaaaggaaaaagaatagcaataataaggctcaaatagaaatgtcatttctattcaaccagtgactccactgagaatgggtagaaaaaagtgctattttgaaagttgccaatgacctcttaattgccagatttctataatatttcaccctgttcattttataagtcctcttctatgttattcttggattcaatatttgtgtttaaaaggtaatattaagtactatgtatcaggcactgtgatatctcttaatctaatttgtcactaattcccttaaagtaccccatgcccaacctaaaccaagtggatcttctttccaatttgtaccccatggtggcatgcctatgtgttttcatttattctgttagcccatcctcttacatgtcgaaaccttgttcacctcagatactgactcacttatgaagccttccccatacccatcttccttccccaaccagatgtgcccctctcttgtttaaattcccatagcacattctattttgggttatcctttcatgtgaacatgctttgtctgctcttctaaaaaaaactcttgaaagcagggtctgggaataagtttttattacctgcaactctatggtgtctagctacatatatgtattataggtgttcagcaatttgattttagtgaagaaataagttattttccagagttataaatctatctacctacactcctctaccagccaagttaagttctcaatatatgtgcaaatgctaatttggttttttaaaaatcattatagtaataataaatatactgagagtacattcaaatcattataatctacaaaaggtattatgagcttaaatgtccttaaatggatactaaaagcatggtgagcatagcaaaaccaatctttaatgaagacattgtacctgctttcagtattattgcattgaaggcaccttatgcatatgagcatttatcttgtttcaagccactcatctagggactttcatctttggtatctcatttgatgtttatactatatgtgaattttacactaagaaaactgaggctcagagatgtcacctgaatggcagagattttttccatattaccacccgctctttgaagtgtaacagagtgagggaaaacattgtaaaaacataaagtcagagccatcagaatagtttcaagttgttttgtgattaatctttccagtgctttttaaacttttaggttaacatctcaaacttttgataactcagtaaagtctgtacatcttctccccaagtacatacagaagcatacacatattaattttgcatacaaatgcaggtgtttgtggattcactaaagctctctttacagaatagttaaagaacatctatttgtgctcccttggacaatatgtgtgtcctttattagcccttacatttccagtacttgagatgaggttttccttctgtttttctccttactttaagacctgaaatgagagcccttcaccaacactgacatgaagacagctgatgactaggaagcaagtgctagtgaaaatagtgactcaaagaaccttgattcacaaaaaaggcatggaaagggagctccgaacgttacacattccaaatgacttatttaaggttttccaatcaaagccatttttacaaaaaagaaactgttctcagacttaagagtattgtactaccacatatgtgggaaaacattgccagcagttgattggtgtagtttactttggaatatattcagttctcttaggatggacttattaactgtctcaatattaatatttctttatggtaatgccatcttcagtaatatatttgcttttgccaagttaaggaaagaatgataatttatgttcatccctcctaggttctaaaacaagtgccatcctgaaagagctgcatatcattttagattcataaaaatgcattcagattctcagctgatacttaaagggactggtactagcaagcacggttcctgatgtatttaaagagcgttcaaagaggtgtgacaagaacaacattagtctggaaaaaaaaacagagatggaaagatagaaaactcaaaaggacaacttaagctgttaccttctttacatttcccaaatacctttttttgtaccaaaataagattataactatataagtgtctaaaataagtaaaatgttatgaaaactttataatgtgctccatatcaggtaagtttatattttatagattttataattaaaattttttttctggtaaaatatacgtaacatttactattttagctatttttaactgtataattaacaatgttgggcaactatcaccactatcagttttcagaactgtctcattatcacaaacagaaactctatacacattaaacaataaccgttcatttcctcagcccctggtaaacactattctactctctgtgcctatgaatttgcatattctaggtacctcataagtggaatcacttatggaatgttctggaaccctttcatacatatttgtccttttgtctctagcttctttcacttagtataaatgttttcaaagttcatccatatttcagcatgtatcaaaatttcattcccttttaaggctgaatactatttcattgtatgtatataacacatatggtaattttgaattgcaaaacactttcagtacattgtctattacattaaacatggctagcatataacaccaccatattatcttccatagatgtcaagtaatatacactatgaaggtgccataatttatttggtcaaaacccattgaaaaacatttacttaattccaaattgttttgtgacttcaagttatgtggtaataaacagagtatattaatccatatgtctttatatgtcagtacttttacttttgatcaaagaatgcttggagtggaattattgggtcagagattatgcccagatatttatagtttgagtactctagatactgtagtttatagactataaaaatcctaacattctgtaacagatagtattactgaatgttctggaaccctttcatactatcttaaaaatgaatacagatactataaggaaatcaactgaacatgatccgagcaaagaaatattctctcttttttcatttccagttcatggaggaaaaatgctatacacaagtattgagagagaaagtctctcaatcatgcatttttttatcatagatgacaaagtgcatcatagatgtcagttaagtcttgtaataacaatgtggaatagtagaaacatctctagctagtttttagggtttttgtttgtttgtttgcaccagcaataggttatttgcatcaaacctaatctaaaatttggtctgtttgttcagatttatgtacctacattatggtaaatcttttatttttttttcttagtttctctttaatgtattatttttagtttattctgaaatagaataataaagcccagtgataacagtgtcttattgaagctaaactacaaaatatttggcgtatgtgaagtataaacagaattggcaagacttttaaccatcctcctcagcagaagacagtctctattgcatcggccaggagaggagaaacagaaggcttgctggagattgcattagtttttacttaaacattaaaatgctaaaaggacaaagatgaagcaacatgtcttataatatatgtttgagtatctacttaaaactaaagggttgctagaacatttatttagttggacagacacactccacagtgtagctgaccctagacatgtcacaactgcattttaaagtatgctttttcttcagttgattggggtggggggaattattaataaacatttctcctatggtttacctctatctttatggttgtttgattaaaccctctttgaaaagcagacgtaaaacaaatcagcattcttatctttgtctgaataagcaacaccatggccataccttcttaatgcactgctgtggttatgagaccaaagggtagaagcagcagttttttggtcattgcaatagtcacagcaacacaacctgctacattcctcacttatatactgcagaatctgaccaaataaacacagaaaagtcagtaatacctttaatgcaattcttgcacaactctccatgatctttcatacacagcttctctgataattgaaatgtagaggaaaataacctgaatgttaagaccccttttccatttccaaaatgtaattttgctgggacttgcagaaataacattgaatctgaaattagtgggcatccaatggagtcactagaaataatctgtcaaaatcactcaaatacaaatttagatttaaagaccaggaaattctaaagagtaactatggtaatatattaacaatttaggaaaggaacattatacatatatatttatataaatatttatacatatttatatttatacatatatatttatatatatataaatatatataaacatttatatttatatataaatatataaacatttatatttataaatatatataaacatttatatataaatatatataaacgtttatataaacgtttatatatataaatatatataaacatttatatttatatataaatataaataaacatttatatttatatataaatatatgtataaacatttatatttatatataaacatttatatttatatataaatatatgtataaacatttatatttatatataaacatttatatttatatatatataaacatttatatttatatataaatatatatgtttttatatatatgggtttctacttataaggtataatcactggagaataatggatttttagaaatgattcattctgaaaagactattttaccacttttttaaactagtgccatcaaaaataaattgtgacaagtcactgtcatccaagttagtctctcacgtggctctcaaggaagtgagtagttcttggggaaatggctttcttcaaatttgtgctttcctgcagtgagtcaagctgagataaaatggggctgatgttcttaactatttgttacatgcccatatttattagaattacctaataatcagtaaaaaagagttttatgataactaaaaatgtacctattgagactctccattgataaaagttggctaagatacagctggtgatcctgtagaaatctaaattacatttttttcatcttctccatattagagaataactcaggatttcaaagcaaagcatgaaaaagtagcatttgatatattttatcaatgttaagatttctggggagcttatcagcatcatatactaagcattcaataaacgtaaattgttatttcataagtaaaatatcaacagcataaaaatttctgtaactcaaatggccagtatggtacatggctttaatacaggagattacaaaacattagttgaacaacaaaatgaactaataccatttatttctgaaagctaccccccaatacaaaatgattggtattctacacaagctcattgtgattgctttagtatatgtggtaggagtaaattatggatagaactaccctcttccctggttcttttaaaaccatactttcttccctctggggtattataagttggaaattagaggtgaatcatattttagtctggaatttatctagtaagcagttcaagacacttaaccatgcaccatctgtttacccagggcaggaaaacatgacattccccttttcaactatagcagatggggacttttagaaaactcagaatgcaagatagagattataatgatggagtattagtcagcacttcttttgtctgcatctctttttcaatctcattgattgtaaagaacacaatcagagataaagtacagttactgtcaattgaaaatgttttcaacctgcatataggtgtgagatagtgggcctgtcacatcttcacgagatatgttggaatgactatttcaccacaaaattcaaacgtgacactaaaattatctgacactaaacagtccattaaataagaggatgaatgttggcatcttgctcatctatttagaaaagaaaaatcactaacagttttaggcaatacttaaatgtttaaattttttctaataaaatggaaaatgaaataaaatggcattacggtgttatgaaagcaaagcaattaggttaatctcaaaatgtctgactgtaaagttgtaacaattttattcttagagctctcaggcagcttttaatcattttcaagttcaatcaaaaagctctaaccattatcatgaatatattctgatcactgggctttcctcctcccttttgctatttatttttaatttatttatttggggacattttggctaccacttatgtctagatcatgtttttcaggaaatgaatgtgggctttgaatcatacctttaccatttactagctgtgtgatttatacgttactcaacctctgtgagttgtttcctgatatttaaaacaggaaaatcaccgagttgtggtgaagatgaaagaagataacataaaggagaactcagtgaagtgtctgaaatatacatggtaaaggttaatgttttccatttttatcatttttatttccactgacaatttacacagccagacctcattactacatcttttcccaaatgttcatgaattattttttctacccctccccatgtaagttaaacttagccttgaaatgaccctgaatctcactggaaaatgtcttaatgcagacactgccagtgtcaggagaggttgggtccactgtaatgcgaggttgttaggctctgatcagcagtggctgtgggaattaaacctagcttctatatttaactcttcaagtagttgattggatcacctggcaaaagtcaattggctagcaatccttcaccttattttctttgaattgtaccacatgtctaatcactcgtttcactggctcattatcagaaatgatattacgggcattaaataagggtgcttatttcagaagcaaagtgccatataaaataggaatgtcaaaagtctttgaagatcctatttggctaactcaaatagttgttgtttccaatatgcaactattggagaagtttcatattattaagttgtccaaaaacaaaaattaaactaactccattgtaggtcatacttttgttggtctgtgatacatttctattttattgaagcccgaagaatttacagagaccgtgcaagcattattattcagggacttgtttattattaggtgctactgattagatgtgatgaatagcaaaactgttaaacaaaataaaaaaaaaaaatagagcctcacttactgtggaatctttactaggagaaacaccagcctataaaagttgcatttttaatgacatatttacattagtatgatgacaatttttgttgggcttgaaaagcacacaattttacattttatttttcttatatggatttctgttattgatatgggccatttgggttttaaaaaacaagtacaaaaactgtgtaggaccttatatttaatatgtaaatcacatttatttacaggggagaattttgtggtgagcaagaactgcagccaaatttgtgataatttattgcagttggtagagtctcttcatgtattcctgggaacagaataacttcactctttcacgtaaaaagtataaatcatcagtgtaagtttgtcttaaatttccaagccaatattgttaatccctatttaaatactgaactgattggctgtttaccaaaggcttgaggggtaaatttggggcatagtctgaattaagatgagatgttggaaacaatgaaaatacctgctttaaacatgtatgtacatacaagtatacacatatattacacatattttatgtatattataaactataattatgtatatgtgtatctatgtatgtattcattaatattttcttcctatttcaaatatttgattccttgaaagttggatttcatttaaaataaagagacaagtgcttggaaaagcatgtgaaaaatctttgtttccagagccaagtttaacaaggaaaacttattttttcactggcagtttgtttttcaaagttatgagaatatgtttaagattttaaagtgatttatttaataaatgagtatgaatatgaatttacctatttcagattgctttatatgtcatattaatttttaagtatatatttatctgtttaagcttttctgaactagatcttaccaggttataactactgtccaattatataagaacaacaatatagttgcctttcagcttgaaaaatgcacctgtttcattttgttatttttttaacccataagttatttggccttccatcagcttttctgtcttgaggaatacattgtcctatgcataataaattattttgtacatctatgtttcatgccataattttttagtgtctcacaaagttctaacttggaaggtactcttttaaatcaagtttttcagaatatagacttgttctttgtgaattgtcagatctgttttttaggtatttctcccattttggagaatgagtagagaaaactgtaccatgggacatttcagttctttttctatacttactgctaataacatgccttctcttagtaaagctagaaagctgagaactgcagttaaatagccccaaggtaggacataggcgaaaaatactaaaatttgttcaagtacagtaagagaaccaaatttggtctggcatttaatttagtcttcctcactaccctaacccaagtagtatactagtaactagacttttaaaaaacagccatttgttgattaatggtgcctatttttgtttctgcttcattttaactttgtttcataacactattatacagaggcttattttaacaaatgccattagttggatcattgagtttttcttccgctttataactgattagctctacagttcaaaaatgcttaaaggccagacctgtcaattagaagatataagcacaatagaagtgatgtttctaaaattaactctggaatacatctctcttaatgttaaatacatataatctgggactgggtgcagtggttcatgccagtaatctcagtgattcaggaggctgaggcaggagggtcattaaggccacaagttcaagaccagcctggccaacatagtgagaccctgtctctaaaaaaaaaaaaaaaaaaaattacaagtccaggcatggtggctcatgcctgtaatctcagcactttgggtggccaaggtggggggatcacctgaggccaagagttagagaacagctggtactgtagcgagacctcgtctataaaaaaaaaaaattccttctggatcatttctagaacacaaatatttgtgacatttctttagtgttttcatttttattaagtgttatatactcatatttcatataaactttgtattaattttaatactagtttagaaattttaatttagtataaatacatcaactaatgttgaaattgctaaaactttagggtcaaaattaatttaaaggttactggagttactgttctggtttctagtaattggtgtctccaataaatgcatcagaaagacaaaaatagccatggttcagagtgtctgccctattaataacataccatgatatagcttacagatatggatattaacaaaatgatttattttagaacatcatttatagcctataaaatgatttgccaactgacaggcaacctttgacaataaaatatacctgctacttcctttttttgcaaattcattgtaccacatcagtgttatctcaatagtgtgatcaacagatgactagtaatgctcattctctgtaattcacattttaccaattactaacaaaatatggagtgggcaacaattctatagtatttaatcagattttcctttaaactgaagtatgatctatattcctataatgcttttatatctaccacttcacttaagtaaaagaaagttttctagagtttctatgtcagttttcaagtggatcagtcttttttaaacatttttacttaaaaattaaaaatactaatttgtgcatgcttaaatataaatattgaaatagtctgaaatatatgaaatgatcaaacaaacaaaagtatgggaatatcctttaagacatacaaactttgaatatatttagattatttaagctaaactttattcatttacataacaggtcacaggtgttgcctttactattaaataagattcttagagtagaaaataacatataattttttttgtaaaatgttaagtgcaaagaccagagcattaaacaataaatgatgcatacatggaggaaaatattaaaaggaaatttaaaatgtaaaagtcaattatcaatggttaaatcaagaagcagagagtcagtgagatcacgttatttccaaatttattcaatgtgtatatattacttgtagaactgcgtaaaaagaaattcatgtttggatgttctttaccatctaaacattgctgagagtgtggttgaaatgttcactttttagtagatttctggaaaatctaggctggccttgaaaatattaaatatagtagaagaaggtaagttttccctcatcctaaaattatgataataaattatatttttaaattatcacataattttcaaagcatttttatagtcattgtcttattggacaataccaactctctaaagttggcagaactagaattgtccttattttgcagacaatgaattcaaagttcatgaaatgtagtaatttgctctcttaatcagtatacacaattactaagtgttagagcaagaattcaagcctgttttgtgccatggccaatctagtgctgccctctatcctataggaactggtatgtttaagagttaagcataaacatggaaatatgcctggtctgcttctagttataaattcacttacaaacctcactggatcctgaactaggaaaatctgtaagggttatttactttcatcaacccaaagatgaacatgttaaacaggttcttagatttaattaaacttttttttttccaccatatctttgtgtctatcagcagctcctcttgagtataccatggcttcatttaaagagttgcattgcttaaaaaataaacattgacattgctgatcatttacctgtgttaaatatgccagtctagtttgcattgacataatgctgacatgagattgtatcatttgattatacacacacacatttactagttctaatttaagtagtaagttttggtccttactagaacatgatttatataattggcaacctaatggtaagatgcagtaatataatctatcatgttaaaagataactgaaattcacagaattctctcctataactgcattaggaagttttaatggatttctactaagcttctcttaaggataaaattttttgaaaacaggtcacttgtaagatctgccttagtttgttaatgcttctgaaatatcaccactataacctgctttttaaaatagcctgacacctactaagtaccctttcgccgcctacaagaaagcatttatatttttaattttagtgaagagttcctgatttaagaattagtcatttgctgtcatttgaatttcaagtatgttgtaagtacttgaggttctttctgtatgaattttcagcggagtttttacatttttcatcattaatttcatctttcacttgggatcagccaaatcaaaaagtttatgttctaccctttcttagttctcttcattgcaaacattcagaaccttctcaaaaataatatcatggcttgagactgtttattgacaaccgataatgccagaaattagtgattatggttttcagtttaaaaagcaaaatgagaaactgaagaaatggcgtttttcctccatttagctgatcagctattcacatcagtgatcattcgcttttgaggctaaggatacaaatgttaatgttttgtatattcatagaagtgaaaaataatataacagttattgtgcttagtctgtgctaagcactattctaaaaccaaatgaatttctcctaacagcagccctaaaaggtaggcattattattacctttttgacagatgggcaaattgaggcacagaacaattgagtaaagtacctgtagtcacacagctaataaagcacacagataggatttaaacaccaggtggtctgttttgagactccacactccacccctatagttaatataagggtttggatccctactctttgttgtatggccatttaattgctttgtggaaagaaagggaaggaggagagagagggaagaaggcaggagagatggcaaattcctgctagctggttgacatggtgtgctataatttataatgaagttcaatttaaggacttgtaaagatttcaatagaatagtcttaaatgttcactaatgaagtatgtggtaatatcagatggagatagcaagtgaatttcaatttagtaataaccataattgtaattcaatagcagtctcatatttggaacaaataaaattcaagtaactttttaacttttaagttcaggggtacatgtgcaggtttgttatataggtaaacttgtgtcatgggggtttgttgtacaaattatttcatcacccaggtattaagcctagtacctattagttatttttccaatttgagtaattttcacagcaataattctaccttttcttaaaattattaggtattttttcaccccaacactcaaagcttatttaatattaataaaattttaccttttataaaagtccataaattttagtaaggttgtaaattaggctgaaattacaaaacaaacaaacaaacaaatttagagcttttagccaaaggaaagcaccctcatcccactccagctcacccctgctcatttctatcataactgcttccctaagaaagaagaaatttttctaggcggagcttgcagtgagctgagattgtgccactgcactccagcctgggtgacagagcaagactccatctcaaaaaaaaaaaaaaaaggaagaaatttttctgattggtcagatttaattgaacattcactgagccatattttactattgcatcgggtcactgtgtatttaaagatacaaagcaggctggacgcagtggctcacacctatgtaatcccagcactttgggaggctaaggcaggcagatcacttaagaccaggagatcaagaccagcctggccaacgtggtggtatcccttctctactaaaaatattaaatacaaaaaattagccaggcatgatagggtgtgcctgtaatcccagctacttgggaggctgaggcatgagaaccacttgaacccgacaggtagaggttgcagtgagctgagatggcaccactgcactcctgggtgacagagcaacagagcgactctgtctcagaaaaaataaaaataaaaaaaatacaaagcaatggtgcccacattcttatttgtccagcgcctggtcttgtgagagcaagtgcagtgagtatccttgaagcctagaccttcaaggtcctctcctctctttcattccgtgcaccagggtgggcttcatctaggagaacaatggactcatttctgtcttttgcctgttggtccttgcagatgagtcaggtttcatttggagcccagaaaatcttacatgccctcttctcaacatcttcctttacacatgtctcagtaaatattaacatgctctaaatatgcccttgccataactctgaactcaggattaccagaaagtaattccaaagctgagacattttccatatcttaatcagcagataatttgtacttacattaacactgacttgattattcacatgttcgtttgcagtttgaatctatttctgtcttcaagtacttaaaatagatatagattttaatcaagatactttaggacttttattacatatttattatgtaccttatttcaggcatttattgtactaggtgctggcaatagaatgttaaacagaatggtatacaatctacattctaattttcaaataagattgttatgaaagtgtacttaaaattcaaacaggaaaagagggctgggcacagtggctcacatctataatcccagcactttagaagactgagatggaggagtgcttgaagccagtagttcgagaccagccagggcaacatagcaagaccccatctctacaaaaagcactttaaaaaaatttgccaggtgttgtgatgcatgccatagccctaactactctggaggctgaggtaggggtgtcactggagcctaggaggtccagcctgggctgcagggcaagaccctgtatctaaaccaacaaacaaacaatacaaagcaaaacaaacaaacaaaaagacacaagaaaagggtacagaaattgcatgcaaaaaaactcagtttaatatgcatgtttggcatgttagagatagaaaatatctaacacagaagctttacaagattaaaggttgattgtcacttcagctgaacttttacttaaaacaagcaagtgtttattcaaaccaagccacaaactcaaatagtaattatccaactttatagtttctcacttaagatagaatgcttttacttatgacttgtagtaatattaatatttcaagaaactaaccatcagtgttttcaaaattaggttattccagtgataaaaatttcaagagtttcccatcagttttatttcacgtctccaaaattagattaaaatgttacagttttaagtaaaaaactagtatattgactattgactcgggttcaaagttctatcagaaggtaggtcagagaaatccccagcgcaagaacacacccaaattttaattctgaaattctttcttggcggattagatgttggtatctcaacatctgcaatgccaaaggacgttgtcaagttattatcagcattcagttcagcactaggttttgagaatttagaagttttttcactactttttctcctcctactccatgacagattgcttccaacgctaaaggtatcttgactcattcatgcaccatacattcaagaaatacatacatttgagttactgatcacatatactattccaggtatggtactggtcactaaggcatcaaagatgactaagacacagacttggctctcaaagggtccccagtgtagtgagactctgcttcttactcttcaagtagtatcaattatatgcaaccagaaataacagggagttaagtagcatttgtatcatattaaatgtagattgggccatgtaatttctcaaaaatcagattcaatcaaggaaagcatagactattctttgggatttgcccttgctgagtatcattatctattcttgagacgtaataatagaagttagtgagcagttcatcaaatacagccctatggaagccaaaatgaatattttctttagtcattgactttctagacattgctaaggcatttaaagtttccctgccaagaaatcaccagtaaacagcagtgatggtagatgcaggctatttactgccatgagttgaaaaaattagtgagctaccttttgattgcttgtcaagcattttgacatgttaggacagaaagcactgtttaaatgtaaagagcagttcatgtagaattgctgtaggtcatcctaatgaggaagtgatctatcaagtgaaagactggagaatgggagaactgccatgatgtaagattgatttctgctaaagagaccttaaatttggctgtgtttgaatttgtggttccttccaatagtttgtaaattacccacagtaagtacccaatataaaaagctattcaaatttactttccagcatactcacattggggattttttttccttcttttttctgtttctctcccagatcaaaagaggagcagtgagtctcaaggtttagggatggggtccacttggagtgactgactcagtaagcctgagtgcaaccttgggccttccagttttaacaagttcctagaaaatgcttttgctgctggtttgtggttcacatttgaccaaatcactgctgaaacaaaactgctgggggaggaggaagaaagaactatgaatcactaagccagcccctgaacttgctcaccaaactgtccagtctgctgtgactataatcactgctgctcaggaacctatcgaaagtacattcagccctccgaatctggggttctgcatccatggattcaaccagcagactgaaaatattcaagacaaaaaaataaaagataactattacaaataaaataatagagtataacaactatttacatcgcatttactttgaattaggaattacaagtaatttagagaggatttagagtacccgagaggtatgcatccctggattttggtatctgcgggttttgatacaggggtgacctggaaccaatcgccccatgcacgctgccaggtgatgactgtaaatggtcctctgaatcagtgactcgctgagggaatcaggaagaacaatcttacctttctgctcaagctcaggctcacagtttaatcttttaacctccctctgcatcagtctaagtttcaaataataatggtaatttatttcctctgttattaaaaaacaagaccaaaaaaaccacaaacaaaaccctatcaagactggtggggtatgacctgtatatttttagcttctgaaatttgtcctattactatttaaaattaaaagaatacatttttctatttataaatatatttaagactgccaaatgatagctgttccttacccaacattagttataaagaaaaaaagcaattccaaacaaaaatgatattgcaacaaaaacatgatatatgtattttgtgaaagaagtacagctgcctcagagacaatgagaggctatgaaaataaaggaaaaccatctgagctctggttagagactctggaagtagtgagcacaaatttctttgaaagaaaaagaagaggagtctgatgtaggtagacaatccaattctagttactgtctttatttgtgatagtccatagtctaaaaaggtgcaaatactattaactagcctgaggacaaggtggcaactgcatttcattctgaaatggaaaaatccaaggaaggtagaagaaacaattgcatgagaattattactcaattatttttcctcaaaaagctgtgtatcttcttttttgaactttgggaaagcatatataagagtttctttgaccccgaatagtccatgtatttacccagaaatatttgtgtatcttgctactgcagcaggattacaaaatagattacaactctactgtagaaagaaaatatgtttttatataatctgtaacttatctgggtagctagaaaacatacacacacacacacacacacacacacacacacacacacacacacacacactacattttaatcctggcatctcagtcaactcccatatctgagtggttctttcaaataatgcttctgagtctacaactttacctttccttctctaagaagtgtcagggcatatggctggaggaacttagtatatagacctagatagagctcagggttttggggaccagttatgaaggggctgagggatctataggccacttcctttgataaacctctgtaccagctcttttcttcccaaaatttccccaagtaacaaggtttagtttagttttttttttttttaagcttcttactcataagcttctttcatggcaaaccctgatatttttttcctaggtagaaaattatttggatttatccatctaattctctgatacagtaaaagatagctataaacttttagcaaaatttatctctatgaagattttagactttgaagcttaactgactaaatttttccaatacttgctctctattgtctgaagggtagacatttccttgcctttaagaggtggaaagccacaagggaacaagtccttaaagagatagtctaaaaagccctttctaatctacaccacctccagcaccaccaaaagtcttcaattttatccacatatttgtttctatgcgataaccgatatatttttgagttactttatttcccaaccccctctccgtcccaccccccaccgccaacaactagagtgcaaattccatgagatcagggtcttggctttttattattttttcattgcaggacctacctacaataattactggcacataggagccactcactaaatacttctagaatgaaagaaaataaaaatgtgatgcatccttacagtagattatccactgcaaattttggttgctagcaagcatgcatcttttgtgctactgcctcaaatgggccttctgctgcagacatacttatctattgacagttcttttgaaccaccattgctcttcatgttttcttgctttaaatcatgctgttgccgctgcctagaaggttcacttgtgaaccttcttgtctttcacactcctaaatttcctcaaaacataaatcaggtgtcctggtctccaaaagtatttcatgataaactttttctttctctaagtccctgtgctgacatataaccctcataccctatgctggccctaaacttgttctttctctacgtccctgtgctgacatataacccccataccctatgctggctcttaactcactctttatactattctctctgatggaaactcatggactttgttaagggaggcattgaaagcaggaactgtttgctatttctggcatcaaaagcaaaatgcctggtgcatgacaactattcataaacattgaataaatgaacaacaacccaccttatttctctctcatggtactactctttattgttttaaacttctatagttatcctggggaaatatgagagtaatgagttttcttgaaagtcaggtgcagggacatttatggcaatacttgtcttgaagatcaactacatcaaagtttcaagactaactagaataattctcaaggagaaggaaagaggcattcaagcttattttggagtagtaaataacagtgattctggtgtccaaactgtcacaaagacaaccactgccatattaagcttctaatactaagaaaagtgtcaggtatacggtagtagatcctgatgaaactcttcagaaactgtttctgcactttacctcatctggcagctcttggtgtgcgctgaggtaatatattaaatttgtggtgtaattagtttagaaattattcccctagggaacaaagatggtcaagagacaaagcttgatctaaagttgacagcctgggagacaggccgaatttggaggtgttaccgtagcatatgtggcttagtattgaataggtcaaaatattaatgacccatcctacacacaacccagggaaaaatgactgggcattgtgagagagtgtgggtgtcttggcagaaaggtattacatctgtttcttccacatctatgagtgaattatgcatgctatgacaaggaggcttttttaaatatgagaaatttgaggcaaaaatgatagaccaaaaaagtgcagagaaacaaggtgagtaatgaaaggcagaagtggtatattggcaggcctggaaatcagctgtgagtaatttgagttaattaaatgtggcataaaacatttggaggaaaaggttgatgagatccaattaatgggcaaaagaaataattttctgaacagtaacatttgggctatatcaaagataaaagtggtatgtgataagagattgagaaaatgaacatgataattcttttgtcacatgaggaaatctgaggtgaggctgagaaccctgtctcgatgtaaggaagaaatcatcttcaggaaatggcagttgcataaaacaaaaagggagactcaggggtataagcaagtggattaaaaacttgtctgatttattcataaatgatctgactccatttacttctgtttctcagatttcttgggaattgataagtatattttctccatagtacttcttgagatgtagaacatctaacatcaatactgattattgagttttgttgtttttctctaactcagagatttttattttaaagcagcagtaagcaatctataattcacagcagtaaactataatctacaagccaaacccattcttagctaagaatgctttttacatttttaaaaggtaaaaaaaggaaaaaaaatgaagaatatgtgattatgtagtccacaaggacaaaaatatttattacctgcagtgcttaaatttaaagggtaaaattaattaaagaaatcctcacattagaattacatgtaatataattatatgtaataaacctaattatattacatataatgcatgatcctctacgaatttaatttgaatgtgaagatttctctaattgcatatatataaacatacacctacagttttatgtgagagaacaattctgtcttacacattatatgatttcacacctttgaggatagattgctagataaaagagataggaaaaaatatttagcagtttcatagttcattggggtcaagaagaaagaggagtgtggcaagttcattttcttcttacaattacaacatcagagaagaaatgaagtaaaaaaaaaaaaaagtgaatcagaagcctgattgtaggagatgcatggagagaatgaataaggcaataaaagggtgtaacttgcttccctacgagttctaatgctaggaggaaaacgaaaaataaaaatataggtctcgagggtgccagctccactgcccccctgctacccctgcccctagcaagtattagggagggtaagaactctatctgctaagcttttgctgtcttctcaaaagagatattgtatagatagtccctcaaatagacataaatatatatccacatctattttggatggtagtatttagcttcttatgattgtgtgtataaagcacttcaagcatgctgctcctagtcaaatccctgcagggccaaacaaattggggcagttcaaagccaagagagatgggagaggctgtgacatactgggaatagattgtgctcttcctaaaaggattaaaattatattaaattaacagcaaagaatataaagcagtcagaagtcaccagttgcaactcctgctctttttcctgtgaaccgttcccctttttcaggtagagggacagagggggtggggcagggacttctttcagttgttactttctggttttccttttttcgcaaattttttttttttagacattctgtatgtgttcataaaagtcacacatatgtatactctaattacaatgattccatctacaaaaatctgtattacatataattattacattttataattattacatttgagaaaaattagttttcttcccaaaggaggcctatataactttaatctattaaaataaaattaattttgaatagcacattaaccagatgttttgctaagctatttctggataattccaaactaaattggcaaattttatttatttttaattgacaaaattatatatatacaaggtacatttacaaaattttaaaacagttgttaccttcttgaaactatttattctaattttattctaattcaattcagcccaacctcaacatctctgcatttcccctatgaatccatctactatcatcgtctactctccaaattcttcctgataaataatattcttatattttttaagcagttaaatttataccacttactatttatcagtggcatttaactctcacaagtattatccacattttacaaataaaagttgcacagttggcaagtggcaatctagaattcagacccaaaggcttcaacccaatgggtcatgctcttaatcatgaagctaaacccacctcaaagaagtatgagggaaatgaaaggcagatactggatcccatatatacaacagctgtcaggtggaaatatctgacagaaatgtatttccactgaactcttttatttctctaaccattgaattaagcaatagcacatccttattaaacatgatctctctttaaacttttgattatttcataaatttacatatatatagtaatgtgaacttttgttaaaacattgcaaaatatcagttgaattgtatttcaaataaatatatcactttcctcaatgttgacttaatgtgcactactgttcatatttttctggatagtccacaattattcaaatggtaattaaagtgtcaaaaccatgtttcaacacttgtttttatgtccatgctcctaacaaaacagccctctttgttcttcacattttctggcttcttcagctcaactgaaatttggatttctcttttttttttttttttttagattccctctaccatctccaacagaaggttagctttctctttcaagagtataagaggcaggggctgggtgtggtggttcagacctgtaatcccaacactttgggagaccaaggtgggtggattacttgagcccaggagttcaagaccagcctggacaccatagtaagaccctatctctacaaaaaatatattttaaaaaatcagctgggcatggtggtgtgcatctgtagtcccgtctactcaagatgattgcttgagcctgaaagatagaagatgcagtgagccatgatggcaccactgcacttcagcctaggctacagagcaagaccctgtctcaaaaaatacagtaagaagagccatgccactccttgtatttatgccactttgtttttgcttctactaccatactgcactgccctagtttgaacttaatgttaggaagtactatggccctctctctgttcaggccacttcctattcaccccagaaccagtgtccatttgtagtcaactacagttcaccaagctttctattatttctttagctccagcacctatattcatctatctcataacttcatatgtcatccacatctcaaaattcaaacttctaaactccactgcaacaataagagatcaaatgagcttatgtgaggtgatcagaaattaagatattgtaaacgtcagaaatgtaaaaggccaaccactatctgttctgcaaattaatatattgttaatactaaaatttgtagtcccagcatatgtttgctttttttccagaatttgctgtatctctatcatatgctaggcactgattatttggtttcatttttcttcctattaaatagtgacaattttttttaatttgttttccagacagaatgacagcttgacaaaaagatgttgtggtgtgtaccaaataccaagatgcccctcctacctgtactctcttttgtattcccagtcataccaccatagtttagattctattttttatttcaacttttacaaaagtgtcttatctccttcctgtctcgtatccatctgaagatgaagagtgttgggctcttccttcaggggaaggctgtcaccacctgctgaattatgcccaagatttcagcagcgagaacttcctccttcagaaatgaagagaaccaacacaggaagtagcatgaagatgtgccatagaattaaagcaaggtgatgcttaatgaatctttcagtgccctctcagaaatgtacacgcaaatatacgtgtgcccaagattttcagtgtaatttcaaagggattctcagaactctacatgccttgaacactgaggtcagaaccctggttccagatattttaagatttgcttttaaataatgcaacccagagagctgtgtgcttggatcaaattgttcagattccttgtagcattgcttctaagtgtcccaccctatgcctttgacttgcattaatgggcaaattgtaagtttcttttctgtcttttgacagaggtcatcatccatcatatccttcgtatgtggtctgtataaatgcacacaatgtcttacatattatttcaccaggctaacagatacctggagtacaaactaaagtttcagggactccaggctagcaatcttctaaaaggaataaactagcttttataaaacagaccttatttttctcatactctgttttttctagttattctcttattttcccatcaattctttaatgtttcaactatatcatatgtactgaagtgaaataatgcaacatcctttgttcacacctaaacccaggcattaacgtggaggcctagaggctggtatggtggtgccagtgataatcaaaacgagaattcctaaatggatgcagttttcctccgtcacctacctggagattgttttccaatgctaaaatcaggccagtttcaattttgctttaactaagagaattggtgttttctttcattgttactttgttttctctaaaattacgatgtcgtgttgctgcccattgaatatatccagagtatactccgtatcctggcacttcaggcatttctactgttccaacctatggctgcagctccgttatttccaatttccctaatcataggcctgtgctgctgtcgaactccacaagtctcctttcaagcactgggaagtttctgatctttgtggcacttttcatgctattaactatgccaggaatttgatgttctcacatgcaatgcatattaaaacccatttactataatatacttatatagctaataaatcagacaaaaattattaaatgacacttaaggattgctatgctgttatacaatgtagatgtatactaccttctacctcgtggcaaacaagtgccttcatgtttttgctccaacttacttcaacagcctcatgtcttctaacacttaactttaaattctgtgttctcacagtacttgaaatttcaatgtgctttgctctatattttctaggccattgcatgtggtactctctttgcctgaagttctctttttcctccatacttcacctgcccaccaccctttctccctgtaatgggccacaatctactttgggaaaggctggtttctgtccttctcatgggttcacctaacatcctattctgaatcatattccagcacactatattttgaaattccctgtttgttgtcttattgcactgtttccagtgcctacactgcacctagcacatggaaaacacttgagtgaatgttgctgacattgaaatataggtattactggttttgaagagctatttgataaaagtaattgaaagccataaaaatacttttcatctattaatccaggaatcaaaaacttaaatgctttcagaggtcaggcaggtcatgtaaatgtccagtgtagtacagaagataacaacagagagtacagactaatgtacgtaccttatctaaacacattcagattcacatttttataattactgtccaagccaaacaaattataaccccgtcttcaaataatttcttagaaggaaaaaaagatatatttattaaaatgttacctgcagatttatttgtaataaggaaaaagtaaatacacattaaatagccagtaatagaggcctgattaaatatggattatatccattatatgtcatatattctttattattaaagaatctcccaaacggtaatatatggaaaatgctttcactattggaaataataaagaaaaaagctaaattacatgctttctataattgcaactaagtaaacatatgcttccttattaaaatgaaaagaaaggattatgcaaaatgaaaatacctataatagggtgctcaaaatagaaatgatttttttaaaaattcaacatttagtaatgcttttgtttttccaaccccagtctttggagaaaatgttgggactatcttttggaatcttagaatttgacacctagcaagcaaaatcatgttactttgggtaagagctgaagaatatcagttgtgggctgagatagaaataccattgtcatggcaaccaccaaaaatttcatagaaaaggcatagcttggattttttttaatggagatgactaacaagattgcttttgaaatagttctgatatagtgtgggataatatacagtaactccgataaacagttttgctggaaaattgagataaagtggcataaccttaagatcagaacttagaatccctagtgtaagcttagcatattttgtatactaattagcttttactgacataatactaatatgataccagtctgtcttccctgaatacaaaaattacatatttagtaacattataattctataatgataataattctcatcaataaaagagcttgggttttcttgtcaagggagatttaaagtatttttctgattctttatgaagactcaattatgtgttttcactgttcctctatgatactatatataacctactggaaacagaagcttgtggaaatactgatagcatcaatagaaatcatcgtgactccttccttggaaagggcatgtttcatcagtaccgtttgcctcatttattaagctgaattgtcatcttaagtgacagatattttcaatgtccaaacttcctgcaaagatttatgtattttatcccattctgtttgaatttagatcaagaatgctcattagattattttgtgagcccaggtttgctagagtttacaaaatctgacctagctcactagccacagagaggctatcttcatacaatgaaggtttcctgaagagtgaatgaaatccatggctttgtcgaatacatcaactaatacattgaaactgctaattgtgtgattgtcctggggacatgactagtttatttggaaactacttgtaaaatctgctttgccttgcaaaattgcttcccctgagaaattgcttcttcaatggcatatccagtggagacctttcggtatcttgcacaattagtcagcctagatataggaccatatagttaagaaggaagagacagacggtcagtaattacaattttaaattataattacaaaattgtaattattttaagggtgaaattctaattggcattttttgtttcatgtaaacttctgtagagctgcatttatcataaatagccacatatccaaagtatcacatttctcatgtcacatacaaacttttgactctagcattcaatgtaacgttaaaaaaaatcaaatcctattacctcaaaataagggctgtgtgccaggattgggaagcattacaaaatgagttaaaattaaatgagatgtggagcggagtttgaaacccatgccgttaaaacctcataactgaaattggcacctgattgtttttcattcagctctcgaaccagttaaatagatgccataaatatgttgattcttgtaacccgtttagtctatttattgttttctgaagccaccagtaaaactagtctttttcaccagctactgaagacagaggtcatgttataaatcaaatggaattattaacttctgtttccatttttaagcatttgaccacaaaattaaaccttgtatttctacataaaaatccaagcattataatgtgaatgagatctgtccactcattcattcaacacccacttactaaaatgctatttcaaagactattctaataagttaaaaactgtttgaggatcttactgtctagttagtcatacagttaatcatcacaaatactgaaggtttgaatcagaaaagaaaaaagagaaaaaacaaaaacagttttgtttttttttgtttgtttgtttttttgtgattggagtctcgctctgtcgccaggctggagtgcaatggcaacatctcggctcaatgcaacctctgcctcccaggttcaagcaactctcctgcctcagcctcccaagtagctgggattataggcgccaccacacccggctaatttttgtttttttattagagacggggtttcaccatattagccaagatggtcttgatctcttgacctcgtgatccacccacctcagcctcccaaagtgctgggattacaggcgtgagccaccgcacctggccttaccagtatttttaaaatgttgcacacaaatagccataaatagcacaggggtaggactttttccattgaaaaatatatgacttctctataattaatttatatatcttaaccacttatgttacaaatgaggaaaatataaatctaccaaaatcattctgtaaaaccattcctgctttgagtcatatgaatacttgttgctaatttgaggctttctaaatttaaagacataagatgagtagttaatgactttgaaatttaattaggaaagtggtgactgagagaggactagacagtatgttgtttgcactaatttgatttatataacccttttctagtcaaccttttaaaaatcagccagagagtagaaattctccaccttcaaaaattaggaggtttactaatttttgaatctgggtgaagtttcccagattaatccaaatgcaactaaaatgtgatgaaagatgaagctcatcttagttttcttaatctacatgacctactttgtccagttacttaaattcagaattttcatgttcacagtttgaaccaggagaagtacctctctaggttcacttttctctgaaattctaagactaaataaaatattaataaaatgtctcaataattatctcacaaatatattaagataaatagtatgaaataagttttaaaaaatattagaataacagtattattagaaaatatatcttaaaagggattaaactacacagatataaggtttgatgtattttcttaaaagatgagaacttactaccagaaacatgtagtatattaatagcctcattatggaggtgagattctctctttagcagaacacaattagggaatatgtgagtgatgttttattttttatacattgccttattatgcatttccagtcatgatctcctagtgtaattgcatttaaattgtgttcttaaccatatgttaattaaataaactcaatgtaaagacccaatctaactttccttagtaatgtggagttaataaaaactgcagctcattggaatctagagtattacaggatctttgcatacctagctcttaaactgatttgttttggattccggaaaacttagcaccttggttaagtggcttgtgaagaaattttgatacatacatccacctcacgtagatctaatagctatgtgtttggaaagtattttgtggaaacaaagaattaaacagcaaggaaatttggttttccttaagaacactgaatcgtatagagataggataatttctggagacaaataggcctgtcaataaaggtcaaatatatgcaactccctccttttgctgaaaatctgttattccatgttgacttagatattaagagaatactatactttccaataattatattgttataatgcaggggatatagttcccaccagtgactctacatctacaatatatgatgaaataaaagatataattataaaatatcatactatcatactcaattcattgagataataaagtacattctaaaccttatttaatggacaaatacatgcactatcaggtggttacatgaatctccattatatttgaaaaaggtatatgtgttgacattaaaaccacatttctacggtgtcttaaattataactacacaaaattaacacactaactctgtcacttatttacaccaataaaagtctgtttccaaacaagaaagctgcactgggtatatgtatatgggtgtttatgtgatttagatgactggcatatttttaaaaactgtccaaaggagtttgaagtcataattttaatgtagcaggaaaagataaagtcattctcccatatttccttaatgttcagatgctatgtgttgtatgacatgatgtatataatgtaagttactaaaactttttttggaagagaaaaagctagagtagcagatatgcacactaaaaggcaaaaatctggttttacaagttttataataaaaaaggtggcaagatgaacgtttttttaacttagaactaaatttaagcttaacttttacagcaatctttagaaaattttgctatatggtctttcttgaagattatttgtaattttgtataattgatttagaaattcccatcaaattttaaaattcagagttctagataaaaccatcaattatctgaaatcctttctcagtcaagactgcccatgaagccaagtgccttatttgatcctataagcttcactgaaaatcagcagagtctttattaatttataaatgatgggcatgattaactggtctcaagtttgctcacaattctgaacccttgaaatcactgaaataccaaaaaaaaaaaaaaaaagtaagaataaagctattaggaaaagcgattacttgagcctactcagagtctcagtgaaacaaaggtccattttgtgcataagtgtaaagaaatatatttttgaaaaaattgtatttacaattagaaaatgaactctgaggtttcatttattgctagtcaaagagtttagagccattgtaaatagtttcctctagaccgtaatacaatgagtttattttagtcagcaattacaatgacaaaatgctaggtatcattgagtagaacattaggcaaagatccgtttcttcctcttgtataaaatctgaatgcattctattaaagaacagaattaaacaggcaagcaaagatgtattcaagactatttcaataggggagaaagactgaactcaattctgctgaaataaaagggaggcaagtttttaaatgatgctgtgagctagtgaaaaatactggaggatattagggtagagtttgtcaatgtgattagacatttgtgtttgctaatgggtgcttagccaagttagggtcctatccttcgtgcagtttgggaaataggaacattattatctttcttgattattacatttcaaaaagatggttcccaggtctatcagaaagacattcttgggttgtaaaatatttacagctcaaagagtcagagaaagaatttacaattccaagttttctaaagtaagtgatcttgaaaaagggtggttagaggcctagggtcccagaaggaagaaacctgccggcagttcatcaagctaagtgggaactttaaggctgtcttgatcaatccaaacctggaacacagattcagatctgattgccaatgcaagaaaaaagcttgaaaagacagacactcccctgatcacccatcctcccttatctgagttaaatatttcatttatttatgtttttttaattttttcataggtttttgggagaacatgtggtatttggttacatgagtatattctttagtggtgatttgtgagattttggtgcacccattacccaagcagtatacgctgaacccaatttgtagccttttatccttcacccccttcccaccctttctccctcaagaccccaaagttcattgtatcattcttatgcctttgcatcctcatagcttagctcccacttatgcgtgagaacatacgatgtttggtttatgtgttactatggaggcacaggattgccaatgtcacagattttatctggatgaattgcaagtttttgtctgtttattactcttgacaagagactatgaagtttatgagggcaagaatcttgtgtgtttgtaatctcaggatttacagtaatgcccctcacctcatagtaattcaattaatacttgactgaattttaaagatttcagagaataagataagaaataaggatatgggaataagagtgtggatattacaaaagaagagtctttagtttggtaatatgaatgctataaaggaatatgatcagagacatgttcctggaggtatgaactgttctagtaaatcctagacaactaaaagtgggccatacccagtgaagataggaaaaggagcttatgtctaatgtatggtatatggtagacaccatgttagcatatctaaatagtccttcgtctggaagaaaagtattacaggctccacttcataagtgcagaaactgacagagtagccatatagctacactcaccctcacctctgttgcccagttataaagccattagactttgttgctgtaaacttaaactgtaatcgtttaatttttagagaatagaagaaacagaacttttaactttacatattagatgacacccccaagaaaggatcatccacaaaataaaaatagaatctatgcagtattagatatatatttaaatgctagagacagggaaggataaaaatggctaatgttttggggtaccttccaaaacatctgaagggagtgtcaacacaaggagaatctgtttcttggcagaaccttcagcaattaaattctggtttggatggtcattgagatggaagttagtggggctcttcccggtatttaaaacattctctgtgattctttgctaatgaaatatctctgtttccttggttttattatcactggaaagacgtttaagggaacaatctttctgtgtttttcagatgtgcattgagaatgctgtttaactcctattatgtgctggagaggtattgatagttcctgtatatgtctctgtatgtcaggacaagaaatattaaagctgcttggtgccattcctatctggttaaaaaaaattataaaggaagatattcctgaattgaagggagatgtctggaacaagagcaagcaaagtggagagaatttaattaacaatttagttcaatctgaaagtcccataaaattcaaatacccatgttgggctgatatgatacttattttcaaaacaatatggcttgaaactttttctaaagaatttgtggtgagaaaaaaaactaatggtaatctactgaataaaagaaatatctatttttctaacaattctttgaaatccttgacttgtcatttgaccgattttaccattttcttaaaaaaaaaaaaaaaaaggaagttgcatactggaaggaaggaagacttagtgcttttctggtgcactgttggcattcttccaattcttctggaaaacatcattctatcatttatgctcccgtgagtcaaaatgaaaaagtctgtatagcctcttagacagaagtatcaggatattcttaaaggggccttatccaaacaggcatatttaaaatagttattagtttatcattaagccctaacaagactgcaaagttgcttagcaacagaatcaggcacccttaacaggaacatgcatgggaacaatggtgaaacataattgagccttaaaaaggcaaattctttgaattaaatcgtgaaaagacaatgtgtcatgggaagaatgagtattttaacctaagacttgttctctaagcattattttatagctagacctaagtgtctttccatagaataaataatgatacttttagtctttatataatttaaggcacttaaaaaagattgtttatccaagttagctcaacaatgcataatatctctattttgacccattaattatcttcaacattgtagagatacataaagaaaggaaggctcttacaaaaataaacactacaaaatatttgatgactgcaagggtttaattttgatgttatgtataatttaaactatcagaaactcaaaaactgtacttttattttttaaatttgaatatacatttacatatacacacataacgtatctaattcccatttgcaggaaaaaaaaaaaaaaaagcctgaaaagcactgtctcttttagagttcttttgactagtttgacattggctgactttatactccagtacccgtaaaagcactgtcttgcttcatttagtaataatggaaacaaatctggtgcatgtgggctgtcttgatataatgcataaacacctaaaaagttcagtcagggaataaactcagggtcccgtctgtggaggcagagaatcccggcttggatcctagtcctatttctggctttatcaaatcacttacccactctagacctcatactcctcatctataaaataagacttctaagatcccttcacatctaataattctatgtccatcaactcttaagtggtgtcattctttttttctcatagaagaattgtttgttttattgaattggttatttgactgctgtctcttatgtaaatactagaagtagtaggcctatttaccaacactgttagaatattaggcagaaaaaattccctactggcttctttttggctttcctttatgtctgattatatgttgcactgccaatttttggtccctgaaagctgaaaacgtgcagatgcagacagatgtaatatgccgcagctttttgtatcaagccactctattttaaaacaactggattttttttttttttttgcagtctttggaagagggttagatgaccaaatctattttccttttcttcagagttttataacaccacaaaaggtcatccttaaacagtcagataagattaacaacaaaatcttggaaaacagccagtgcatcaacaaaacaaacccagtggactgtttataaatgttaagtttaaacaggcagcagaacacgggatggggaggagaggagagatacttcatagacatagcaaagaaataatttccagagatgacccatgacactgcagtgttgggaaccaatatcaacaaacaaacttgacacccagcaatatgtagagtgcatttataaagatgttagaaggagcaagtcgtagatcacaagtcacagaagcagaatcatgggccattcccatactgggttcttcatgccatttttaatgaaaagataaattggtggaaatattttaattgcaaagaagtgaaaaagtgatttttaatgccaccagttgacgccaggccagggttttcactatgcaacctagcatgtagccctaaagtcctgacagctaaatagtagggaagacactgttctcttccttgcaaataccacttcctttactaaggattctaaaggaagagaaagcttttaacagagaacacctgagaggaaagccaccaatatttaaatccaggaacttaatattgacctaaggagcaagtaggcttaggtaaagggcaagctaagaaattgttgaaggccttgcacatttagttaaaatttttaaaattctgaatagaaatagagaattccctgcaaattgtattttatccatgattcagatgtggcctgttagaagtttaccaggatgaaaagtaagctgctgaggattgcagatgatactaatacagacataataacaagcagagactgatatttgtaacaaaggatttcaccagctttctaagaaaggctttcatggttgacacaagaattagattgtagttatacctgatatgaattttagattatgcaatacataaagatgcatttaggagacattctcaataaattgcacatcatatattgcagtagtaaatgttacattcttttcaatgaataactttacagtattttgtggtttaaagagactagtttaaaaataaaagattgttttaaatttgagaaatgagcaagttaaaataagatgaaccagatttctacaatccactttctgatgctcaaagtggagagggtacaaaatggtgcatgactgagtctatggcaatctgcgttttctgcactgtgtgaatcatattatacattctgtaatatgaaggggtacaaggcacttacaggttgcatttttcaaacttttacaaaggaatagtagtcaccttcagagacttctcttctaactaattagaccttagacaaacatatatttgcataagtttcatcaagctgcactttctgaatttctttctcccttgagtctatttattactcaattcactctgttatctaataccccttacagtaactgtatgccctgaaattctcttccctcctccacatcatcaaaacttgcttttggatcattcagactgaggtaaaaaaaaaatgactaagatcttaaagtacagatatttgaatttcaatagaaaagaaaggctaaaggattgaggttctcaggcaaagagacaagagtctgctaggcatcagaactttttggcttctcccagttacaagactcatcttataagccatatagttggagagaagtagtcattcaaaaggctcaaaatataggaaaacaaaaataaaaatcacttcttagttcataaatacaatgtaggtctattgaagagaacattaaaattgatccctgttttctgatctcaaactggccaacagtgagaaggagttggataaagcagccttggtgttggtgaatgcaagaagaattgagtgtataattacaaaaggaaagtgagtgtcaatgtgtgtgtgtgagagagtgtttgtatagaaaccactctagaaaaagacatttaaaactgctaaagttattaatgcactgaaaagaaactattaacttcaaaatcattctattgctatattaagtcatatttgagggacaaatcaatagcaatgactttcttgaaatgtctcccaacactatgattttgttttatggcactggtgggtaaaggggtttggtctgaaaggacacaaacaggtaatactatcagttaagaatgttggcagtagttgagcaaaaaaataaaatatgatagaaagcacagtttgtttcctttgtcctttccttttatgtttagcagttatgtaaattaaaagaaattgatcttactacctattctttttattcagttaccaaaagaacatttgctttgaatgaatatggatgcatttttcttttaacagaatcaggcagccaaacatgactcactgttatttacatgagtcagtatctacttgcccatgtaatcttgtttcactaactttacagtcagatcattcttgttacgatcagggaaaatgcaagcaagaataaatgtgatgccaattaatacaactacgaattagtatttagtagtagttattgatcattttatatgggaagtaaaaaaatcaattatctaacattccattgtttactattatttttaacaaaaatgggattttgtttttttttacacaatgttctgttctttgttaagaagtgaggaaaaaagcacttactgatcctaagcaagtcagctcctcgatttgcctgatgacgatgaatatgaatacaggctttctctccagtacagttgctcttcatcaaaaacaggctggctctaacatatttcacaaacacagaaaagtgtgccaagacacagtcagcaattctttttaatttttgagatttaaaatattactgaactttgtttgagttttacatttctcatggataattttactgtgaaatttatgatgctataaaactatgtttatgaagatactatagtaggtttcacatatctccatatcttatattggtaacatttaaatttgaatactacatctttatcctttcataaactagaagataattgttctgatgactagcagaagaagctggcaggaacgatagatttgccactctttgctttctgttatttgtgagtctaattactctagttggtcaattaatggcaacacatgacaaaatcttcctactaattgactctcactattttgttactgctgaagcttcctctaattttgtatgtgcatatgttaccctacttgtcatttttttcctcctaaccttccttatcagaaagcccatctcaccaacttcacagtcagataattcttgttatgatcaggaaaaaagcaaacaagaatgaatgtgacgccaattaatataattactaattagaagccacattttgagggcattaaaacagaagaagagtagaaatgataataacttggttttagggaagctgttaacatataaatagaacccaaaatggcaccactggtagttttccagggacttaatatttctgacacacactcaatttgtgcccatggataagacatactatattataggagaatcaaagagttacatatttggaaaaatcaggttaccaaaaagaataatgacattgtttaaacaataatgcattaaactttccttgtttattatgctagaagttgtatgagattatctgagtaaaagcatttcaattacttcagcattgtgggacatgaagtgtaaaagaactcagaacatgggaaaaaaaggaaaaagagaaaggaaatggctgaaagattaattacttggctgtcagctgctaggggagtttatttatgttctcttaatattcataaggctcttgtcaaaatggtattattaaatacccattttatagaaaagggactgaggctgttcaactgcagtttatttgatgggtatttatgcctgtgatggggacagctatgtcaggaacttcaattccagttaaagtgaaacctggcagagacatagttttgatccaaattttgacagtagtacaatgttgcttgtccttctccgggatggtagtctgtgtttccctgtaacattttgtctgatttgtttgtaccaactatttggttttgtaaatttatgtgacactttgttttaagctaattataaatgtaaattagactctaagatgtcttttttccactaactggttttgtagtagcaaaaatctgaaattacatgcaaaatgctgtttacagttgttttagtaaggggatgcagagcagtcagagtgagttgtcagattctcaaaacaaaatcaaattatctaatattttacattaaatcaggtaatgaataccgcttctggatccaaacattggtttaattatttataatctttgcagtgtccctaaaatatctattatctccaattaacactaaggaaactgaggcatagagaggtccaagtaagtggcagggatggaattcaaacccaggtcagtttcaggcttgaactccactaattctatacctttcactgcctctctcactgtaggtaattgtattagtctgttttcatgctgctgataaagatatacccgagtctgggaagaaaaagaggcttaattggacttacaattctacatggctggggaggcctcagaatcatggtgggaggcaaaaagcactcctttcatggcagcggcaagagacgatgaggaagaagcaaaagcggaaactcctgataaactcatcagatctcgtgagaggtactcactatcacgagaacagcacggcaagaccacccccttcccccccgcccgaccacgattcaattacctccacctgggtccctcctgtgacatgtgggaattctgggagatacaatttaagttgagatttggtggggacacagccaaaccatattaataatcaacaaatgttcacgtatttcctttacatcaggtggagtaaaagaacaggtgtgtgaaagaaacagaatcaatcattaagcgatacttaaaccagtgcagattagttttaatgtaaatgttataataataatgctagtcagcagttactggatattcatattatgttagaaactgtgcatttaatacattatgggtttgtttgtttgtttgtttgttttgagacggagccttgctctgttgcccaggctacagtgcaatggcgccatctcggctcactgcaacctccgcctcctgggttccagcgattctcctgcctcagcctcccgagtagctggaataacaggcatgcgccacaacgcctggctaatgtttgtatttttagtagagacagggtttcaccatgttggccagggtggtctcaaactcctgacctcaggtgatccacccgcctcggcctcccaaagtgctaggattacaggcataagccaccgtgcccagccctttatgggtatttttaaagttaaatctcacatatatactaccgactctaggaagtagctaaggtgatcaaaacatcaacatgatcagcaattaagtggaaaggggttcctgggggatggttttgaccaagacattaaggagagaagggatgggcagtggtgggaagactgagaagctatttatagcagggagatagcactaagcatgcattgcttgcttaagaactgtggaccctgataacctaaaaagtgtggttttgatgaaaactgaagagttatacctttatgcagtttaaaaataatagactgatatctatccatcccttcatgtttgaacataactggtttggagatgtgttgaaatgactgatctcaagttctctttcaaatctgaactaaatgtctgtgtgatggagatagaggctatggagctgctttcccgagctcattgatacagccccctcactttcgccagtgttttacattctggcaaaccagcatagttctttttatctgtagttattatacatctagttgagaaaacccagtttgatctatttataccaaagtacaaatgaaatctgaattcatctgattagttcttcctgtaaaattgtgttcatttctatcacatatgttgtaacataaagatttttggtgatatcctagtcccaaagtgataacctagatcatctgactctacattctccataggaataaatcatacgaatctctctgaagtaatgttataattaattcctaaaggtaatttataattatatatatgctactttcatgcatatttgatatcattttgactttcactattcatttatcatgtttgcaagccttttgttaaaaatagctggtacacaaatcatttcctgattgccacatctggaaccctgattatatttgcatttcacagtcgttagcctttaaaactagagcagaatctgggaatttgcagacaaaacagtgcttccttctggcagttgcataaaaagacatttttaaatctgcatttctgtttaaagaaaactgatttattttcattctaaatttatataacactttctttaaactaatcataaaatgtaaattaggttaactctaagctttttccccaccagaacaaatgacagtaacattttgtacaaaaagaaaacgtttttctattcacaccttgaatcattgctctccctgtctttgaaagttaattctgattaagatgtactggtagctcattgaaatctttgacaaagccagcttagctattctcttgagtaatgatttaccttacattaaaatatcttaaacatatgaacattaataactaaagtgatgaatattactaatattgggactcaattcatcaaggagaatactttggggaagcagatggactgtgaagggacagggataatttttaactatggccttgatatttagaccaatggccgaggaaaaccatgaagaacatgagaatgggcttcattcatgtcaaggaagcagagtatttgctgatggcttaacatttactgggcatgtcctaacaggatagcctgaaaagatacataacattttatctgagtcatttaatttaaccacatccctctgtgttagtgttatctctattggtagatagaaaccaggctcaggaagattaagaatgttacctaattctagtaagctgcaaaacctaaactgatttaattccagagcaaagatctttctaccttatcagcatgggtctttacctctttgagaatatatgagctctatgagccttcttccagaaaaatccataaataaacaacatgagacgtggtatatcagtacaaatctcactaaatgattagtgtgtttggacttgcatctgctggtagatcttttgcgaatttgccttcctctgagatagggggctttaagtattttttctgaagacactcccaaattatacatataagaaactattttcctttcaggctaaagataaattaaaatgtatttaactacatataggtgccactgttggtctaacactctacatataccaggatacaagctaagatgggttcaaaaactgtccattatactgtaatttgtttctgatatcgtgacacagatataatttaatcaattataagacaagaaaaaagacagaaatgctccttcttcctcctcaacatcatgtaattagcctaccccactgctctaggctaggccaagtttttttgtttttttttttctcctagtacaggaagcatattttagtgactctctgtcacaatcttctccacttcaagtacatctcacataaatctagcctgtcccacaaagtttgtgccaggcagtcttagggtcagttgtacccacgtatgtatgattttgaacttctcaagtagggccattgtagtcagtagagcacagtggttggtactgatgtcaaactttctgagtccaaatactgcttccatctctgactagctatgtaaccttagataaatcacttaatgttttgaaaagcatctgttttctcaggaaaagaggataataaatacacctacctcacagggttaatgtgtaaattcatgtaacatgggataatgcacgttaagcattgcacagtacctgcctcttgttagtaatagctgctctattattaattatcctctttgtatccccattctcagctcccttctaacatataatagttcttcagcaaatatttactggcttgaattagttctaaaacttaggcaatgcaccaacagcagagtaatcacccttaaccatcacttctcccactgaaagggagaatagacagaagccaactatctaccctttttctacataaaacctcttatcgagcctccagttaataaaataatagttctgaaaccccaaaaaatattagcaattgttgaaatcatgctagtttgaaaatagttgagttttcctaacaaaatatgtctcaggatcccagggtcaccaagcttatattaatatagtctagttgggactaatggtaatcatcagtgaactagtcattttttagcttcttgggctcttaaaaaatttgttatcattaagcccacacttcatagagtcacagctattttatttttataggagactcaacagtcaaagtaatctctttaaaaccacaaagcatatgatacatttgtcctgcttaaaacttctaatggttatctagtgcaaagacactaaaacataaaccacttaataagacttataggcctcaagtgctctggcccccttcagtatctcttccagaccttcatgggttccaggcatgtttgcctttttcaagtcctgggatgcagcaagcttgtagctatcacgtggctttgcatttactgatccttctgcttagatcagtttccctctaatcatttcagtgtcatttcagatgccaactctactaccttggccagagagaccagcctgctctgtgtctgtctatcccattaaccagtttcacttgtcaatttgtttacttatgtactctaccaccctcccccaccccactcccaacaactagggcatttgcttaagagcaaggactttgtgttcattcaccaccaaatcttccaaggctttcaacagagactggtatctggtagatgctcaggaaatgagtgttgaattaatgaatgaatatgtgaaggaatgaaaaaaaaatgagagacactatgaaaaaaatatttctcttttgaaagaataatgtaacaaggaaaaaatcttcattcaattaaaatcaatcatacatcgttactaacatcacttagtaattcacatgcaatacaaaatttttctctactttctggttctatccatgtaattaattaaattttgctgactctaaggccaatctgtgagacattatttaacttccttactctaaaatttcagcattaacttggcaagaggcatcatcaattagtggtcatctgatcttgcataaattataattaacctttcaatgcctcagttttctcatttgtagtgtgggaattatacaagatgtataagtttataagaataatcacattaataaagctcttagaatagtgtcttgcatctgccaaacaatatagaagtcttgactactgttactagtattattattatgagaattaaatgtggagaataatccttcatacagttgtatattccactgaatgtaaatggaactaacaaaatatttagaaatcagattaaaggtggggtggtaaaatataccaaggtagaagattatgagggtataaaagcataacagtatttttgtcttttgttttactttatttttaaaagaaggaaagagtctagaaataaaaagacaaaaactctccattggctgtggtgaaatggagatcaccggtgtccttcataagtgaaatttcagagcagtggacaaaggtgttggagtgagggaagccagaagaaagtaaactattgagtaaataggacatgaggtgtggaaaaaaaatctataaagataacaattttgagaaggacagatgtgaatgagacaaagaagatattggatgaccaaggaaggtttcatgttgcatatatactttttactattttaaataggagttagtggtctagaatatgtttgaatttttatggaataatctataaggagtaggtcggctgtggaagactcagtgctgtgaagttcttgatcagatgagagaaaatggaataaccactacatacagtgtgaatggcctttcacattaactctaacaaaaagggaatacgaagatcactgaagatgctaatggataaatggatttgacagtgggccatttactggcttctattttcttaatgagatataaagcaacacatcagctgagagaaggaagtaaagaagaaagatgggaatttgaggaaagtggggaagccttatttaaaaaaaaagaaaaaagaaaaaaaagaatggcccttaagtagaatgagaaagaatttactggttagtcagagcagtattcccagtcttggaagcccatttgtggttggtgtttattaatttattggaatacagatgtgccctgtcacgtgatttttctccagctacctaggaataagttatgaagaggcagaaaagagtgagagaagacaattaagagaaaatacaattagtattttaaatatatatgtgatgttcaactttaatagttatcaaaaaatttaaagaaatggaacatgagggtccagttgattaatttatcaaaatcagtaatcacatatcacaatatcttattttggtaatgtacttcatctaatttggttcaacaacttgaaaagtaatttggcaatgtctagtaagataaaagtggtcatagctttttactcattaattttaattctggaaatttactaaaataatttatatttagaaaatcattatataaaggtgttcattgtcctgtcatgtgtaataacaaaaaaaatggaaacacatttaatttcaacaataagaaaatgattgagtaaagcaaattatatccaattagtagaaaattacagtcattaaaattataattatgagactatctagcaaaatagaataatgcttactgaagagagctgatttcaaatttgtcagccttgtgacaactatgtaaacatgactatttattaaaaatcaaacaaaaataaaaatttaaaagctctgcaacagtaatgggaatttttacttttgttttaaaatatttttagtatggttcttttttataattttgttctttaagaagaatgttaaaggagatttttttggcccctttttaaagactctctgattattacgtcttacattttcaaataaataattattttaccagaaaagatcagacttatttgactgattatacttccacattatttggcagaaaaataagaaatgtcacttataattgtttttagaaaaaatttcaagattttttttcttttttgctgtatttttcctggaatagagattaagcaaactgcctaaaattctagtcattatttttcattattttcatttttattcattatcctgcccttcacaggaacagtaatgaatctgcaggttgcatctgccaatttcttgtctcttatccacatgatgaagccatgctgatatgaacacatccactattttaaaaactcttcagttattgaattataatttggtcttctgttataaggattttatataagtgtaaaatttggactcaacttctggaagccttttgtcttcttagtctaaacctgaaagatccttaatattcacccatatgacaaataattatttgcatagttagaagctcctaaattatttattaaggatacctggcagtgctcttgctatttctcagtagccctttattgaagtttctctctccctctttctcttgtacctacatacacaaccctaaagtaattagggtttttttttatgaggattgccagtataatgtttatagtttcttttacaggaccagatacaaagcaggcactcacggcattgttagtaatgttatcacttttctgttattatttaggtcttcattttcctgactgtgagtttccataaggaaatacaatttccactacatagggtaacacctgttatctggagagattttaattgacctcattactcaaaagaaaaccccaaaaccaacagatcagttgcctgccttttgtgtttgccttacaccagtgttcgataaagatttaattatttaataagttctacttttcaagaaagtagaacaaattgatatggtaaaagagatgagaaaactgtccatggaaaaaaatgatcaactcacttatgtgctgaaagcccaccttaggagaactgctgttttgagaaacacaaaggaaacgtgtaaaaatgtattgagtaagttatagtaattatttttaagagctaagcacaaaatttcctgttgatttacatatttggtaccaacaaaaatcatatggaattagtcatattaagatacaaagttgagctacaaattcatagtctaatttatgaaacatgtctttgttggctgttaaaaagtaagatggtgagtgatctctgagtagcagaaggcaaagagaaaaatagccttttttacattatattatacttctgggtaaaatgtttcataaatctagctacaaagctatatgttctgtagcttttaggtacctgctgtttcaaagatttcccctgtggagattagattttgccaaggaagggatctgtaaaagtaatacaaatgccagtatcattggcaaccacgagtgccagcaaagtgagcctccaattcaaattgatgagcatactatcctgtagtatcttttccttgtgagttttctgttttggaaaaggtgggtagaaaatgtattttaaaaaggctttataggcagaaataacaatacatcattctgaaaacataaaatactttagctaaagttattacagcatcttacattaatatttcagcgtacattagacattgcctacaaccaatgtttatgataatcactgccctctgaagtggaatcatgcccgtggcaaacaataatcttaaagaagattaaacaccgaaaagacatttagcatttaaagacagtttgctttgatttattcagtgagttcttccaaaaacatgttaccaggaattattgcttattgaattggaattaccaaccattttagaattatttagtttttttcttcaacatcaatatcagtaaggtaaagcaaactcaaatatttattggggactgcagaaacacaaccataaaacaagaaaacacttgactttttaaatagactttatattttaaaacagttttaattcagaaaatttgaaagtatattatagagatttctcatacatactatacccatttttctctattattaacaacttatattagtatgttacatttgtttcaattagtgaacaaatattaatatattatcattaactgaagttcatactttgatcatggttcctatatttttaccttatcatgtcacatttgtgttccaagattccatcaggatactgtattacatttagttgtcatgttttcttaggatccccttagttgtgacaatttctcatactttccttatttttgaagaccttgacaattttggataatactggacaggtattttgtacgatgccccactgctaaaatgtgtcttatgcttttctcaagattgggagtgtgcttttgaggaagaccacagagataaagggccattttgtcaagatgacttatcactgctgatgtcaaccttgatcacctggctgagatagtcgtcatcatcaggtttcttcactctttctttctctttctgtattatactctggaaggaaatcactacgctcagccaacaataagaagcagagagttatactccgccttctttggtttgaatagctacagaagctatttggaagttttctgcactggagacttatctatcccccagccatttattaatttaatcccttgtttacgccagtaagaatctgtggacattaattttatacttgggattatataccactttattttgttgctcaaattgttccatcttaaccattatgaactctttcaattgttcccaggctcaataattgtgggtttttaaaaatcacttccttaatttctcacactaccagatggtctacttccatcttttatatttcttgccctggttctagaattggtcctttctccaggaagctctagttcctttactggggagtggtattagcaccaagatctgggtgctatatttgctcattgttactggggtttcattgtttctaggttgtcttagctgactgagtgaagagatatgtgtatgtatactaacaatgtgtatacacatatctataattttttatgtatgttgctatgcatatgtacatcaagctaaggatgagtttatattaatgtctccaaccctaatctactacctcatgaatcagtctagccttccttatctacaaatttcaccttcaacagaacacttgacttctgcaagtgtgaaaatcaaatcgtaataaccttgtgaacccttaggaagccatttgtctagcagaataattcctaaagggcatggtgtatatagtcaaacttcaatttatagccagcagcactttttaacattaatagaccaccgcaattctggttctgataagatggagtggctgcatttctcccaggtattttcactttccactaaaactatgaaatgaatacaataaataagcataggaggcaccaaatagtgaaaactggaaggcagacttacttcgggacttaagaaatgacctggcaatgagttccctgttttctttttgcctcccacatagctcagacagggcaccacaggagcctccattccataaccaccaacagacacagacaaaaaaagctccaagaaaactctgtgcttcttagccaaagtatgagaaaagagatttctaacaacagaaaacctttctggcagtatgtacacctctccagtaaaaccctaatgaaaccataggtcatggttacagacatgatccatgacttttgtttcagagggaccaggtaaggagttgatcgtgcataccaccctactcttgcccttcacaagcaggcagcactgtggttcccccaccagagttgttgcagtgtggttcaatggagagctgagcctccaccccacccgtcaggaaggagacttaaggagatcatgccagacagagctaattacaaatggactccctgcacacagccatggggtccagtggggagctaagcccccgcctctacttgccatcagcaacaggatgttgcaagttgggtataggaggcactgtactttccttcaaaacctggggtcaggggagaccagtgaggaactaagcctctacacacacctaacaccaataggatagaattaaggtagtgtaaagaaagagagttgacacttcatttccctctgccttggttcagggggtctgttagagtgctgagcctccattcccatttgaaggcaacaacatggtatgagtggtcccattctccttgggaaggtgtcagcaaggccaaaggcggagctaaacttctacctcatctgtctgcagtaaggccatgtgagtcagcgtccctctgttgccagtatggtgtcagcaaggcccagtggaacctgtacattcccacccttgtagctttcttgctacaccccaatataggggagcttccttctaaaaataataagttaaaataagatccagagtcatatactactcataatgttcacaatacaattgaaaactaccaattataccaagaaccaggtaatcacaaaataaatgaaaaaaaattatagtcagcacacactaaaactgagataaatcagttgttgaaattatgtgacagggattttaaataagatatcacataaatgtttcaaaaagcaattatgtatttcttaaaataaatgaaaaaatagaaagtataagcaacaaaatagatgttataaaataaaaaccaagtgaaaatgatagagctgacaaatacaacaaccaaaataaaaacctttgttgggcaggctcaagagtagagtggagatgacaaagcataggatcagtgacctcaagaacagataaatagaatttaccaaatagataaatagaatttatcaaacttgaaaaacagagaggaaaacataggcttagtgaagaagtgggtaggaactcaggaacctgtggaacgaaaaataaaaagctaacatccatatcatcaaactcccagaatgaaaacagccagccagtgagatggaaaaattatctgaagaaataatgacagagcagttccccaaaatggcaaaagacataaacgtacagatttaagaacctaagcaaaactcaaatagggtagacacaaagatattcatgccgaggcacatcataattgaacttctgaaacataaagagaaaggaaaaaagtctgaaaagcagatagagagaaacaatgcattacttacagagaaacaccaattcaaatgacagcagatttcggatctgaaactatggatgtcagaagtattggcataacattcttcgagtactgaaagcaaacaactgccatgcacgaacttcatatccagtttcttctttggcttatattaatgaactattaactaaactttctgtgtctaggattgcaactacccttctccaacaatcaagccccagtatttccaaagtgacctttctaaaacaaacaaatatctgatcatgttatgcaaataaacctttctatcttcttttcctctaacttgaacttttctgttaaaaatcattcaatggctttccatcttccttacaattaaattccacactctttcatacatacacaaaccattctttatctggctgctaccatgctctctgttgtcttctttttttacacccctctaagcactctttataccagttgtatatggcatttctttctgttctgttccttaaccattctttttctttctactgtgaatttatctcctctttgactcaaaaatttacctctccttcacattacacatccatctccagtattgccttctataggaagacctgctaatatttctcacttattattggtccacagaatgaattaagactgctctctcttccattacactatgtaataatttgtactatctggatgccccaataaagtaaattcttgatgctaagataatgattttaataaaggttacactgaagtctagcttaatccttggtatacattaggtgttcagtgagtgttaaatgagtgatgaatgagtggtcaacttgaaatcttaatttttccttttttttttttttaactaggactgtatccaagatacaaagttttccaggagattagacacttaggacctttgatttgatttaatagaggacattgttatcaatgcattagtacttaattacctcaaaagaaaactgtcaacccaggaactaaagtttatccatttggacttacaagataacctttaataccccattgccactgtatccgatgctgtcagaggcccacctacatctccccctacactcagcatttcagtgcatactgatagaattgtgctatcacctgcaaatacctctttagggcacgccagaagtgtgcaggagataacatatctggctgaaactttcaatccctgacagaggggatttgggatataaatacttcgactttctcacccactggtggggataaccctgaggaatgttcttcagggttccacaggactcctctaagggacttgtaacagttccccccaagagtaacctgttcagtgctgtgcctctcttggctttctttcatgcctctattctcaattccagctctactcctgagtttccttgctcactttccaggaacagtttgaattcaaattcttctctcaggctctgcttctgagggaaatcagtctaagacaatcccaaatcacttctagtctcctaataggccaatgtgcctttcagggtcatcactggtacagatgctgagggctggctcattgtctgtcgctcctagattctaatgttttcaatcagatagaaaagagtatgacattaaagttagaaaaaaggtatatgagaatggccaataagtggagggaaagagagatcatgtcatttgttttccataaatgatgaatgatagtatagaatttgtgaacaggtggtctataacaggtatgagtataatttgagaagactactccttagtcacccagaagtctgctattattgtttcagaatcacagtgttggaacctttttgcataatttgcttcactttaacctaatatccatctttctaaatctgtccatctttctaaatctctaagtagtagtcaacagatttattctctccctccatctcatcacaagaaaagccaaacacaaacacacacacacacacaaacattttgtgtgtgacaacgcttgaacagacattaaaagtctctgtaaatatccttcaacaaattccaatgtttatgaagaactaaatttagtcaaattaattttttgaagatctaagtgaagatagaagagaaatctagatgaagactgaagaaccaaagtgaatattaaagaaaagacagaaaacttgccttttttgcccgctaaatcactgactagtagtcaacagatttctttccccaccaccccatcacaaaaaaagctgcacgcacacacacacacacacacacacacacacacaattaattaacaaaggctaaccaggcctcttttgaagactgcttgacttgaaatcccaaaattcaacctatactctcatcacgtgtttgtgttgtgagaattcatactcataaccacgaaagttcctgaagttatgatactgttcaaatgacggatgcttgaacatttgcttaaaatttttaaaaatgaaacttatatgtacagataatttccctttctcttgctatctgcatttcagtttcctgactttctgagaagccctggtttccccaaagaagtgatttctgatagaaatctgaaggtcatctccaagaaaaaagagatctagtatagtcaatgaattaaagacaagaaggtttccaatcaggtaggaacactaattctcaaacatttaattaccttaaaataagtatgctgagaactggttatggtgtgactgtctgaaacaataagtatctaacctaccctacaaggaacctgttcacaatccccttggaggttgtgatgtttatcagacaaaaccttggagggaaactcatacaataacagcatgatgcttttttctatttttagcttgttgttactaagtacacttagtgagctccatgcatgtggtttaatcccaggaggttaggcctgtggagcagcagattaaccctttcagtattttcttttaaaacaaatcattttcgtgggttgtctccgtgaccctctgtgaaggtcatgaaaattatgggtcatgatggcatttagttctttaagaggaacagtcctaatgaatgatgtaaggaagttgttttggttcctatggggcacttctcatcttggtcttgggacaatcaaagtgagcacgtatagggagttgaaagggaggtgaatggagcatgtgaaaggggagctctgttttcatttatctatgcacatcagcatcccactgagaattttcttttcatttgcaatttaagtccaaaacttggggcaaaaggacatcccattttatggaaagaaaagaaaaaaacagcagtaacatcataataagtggctcatcttctcatttgcagttatattaatatatacttattaatatatacatttagcacagcacttgatccctagtcagtactcaaaatgaagacacatactgaataatggatgaatgaagagaaaaagtttgtccttggattgctttgtgtgttggcttctgtagtctcagaacccagtactataactaacacataaaatatgggccataaatctttttgaattaatgaataagtccccatgattctaaggacaattataagaccaacacaaaacacatatttgccaaggtctgtgacagaagtatctgtgacatgaaagcctgaatctgagtctgctgatatagctgacaatttttctagttctgagactgctttttaataatttacatcttatcctttacatttaggcatagtaccttcattagatgtactattcaatgattagtgcttggggagaaaatccatcagataaatttcttaactatattacttgcaaacttttcttttcttcagatttataactgataacagtaattgtacatatttatggggtatagtgtgatgtttaatgcatatatacattgtataatgatcaaatcagggtaattggtatatccatcattttaagcatttattatttctttgtggggataacattcaaaatcttctcttctagctatgttgaaatatacaatacattgctttttgctatagtcaccttactgtaaaacatatttgttaaagcatttttataatgacacagttaagggcaatttcagaatcactagctgctaaaattgttatttatacttttccatgggtagtacagctgcagcagctatttctctatattctgctgttgctatctgctgcatttccaagagagaacaaaatccatttcattaaagaaggaaatgtaaaatttagcataatccagttaccacaaaaccaaaacactcacacacactctcccaggtgtgaaagtgaactagtgatctaaaatagcacactgaaactggtttcaaaataagaggacatttactcatatttgattattttattattttatcaattatgatattcagatatacttctaataacaattctgaattgctagatggagcattcactatgcacaatttttgtctttgtatgtacttatcaataagctacaagattgtctcccacaccttattcttttcctgcattctcttgggaacaggagatgtagctatcattttttttaaaatttctacacagccaaaagactagtatcacttaaataaagacagaaaattgccccaaagtagggagcttcattaggtagcataaagttctcatgtgagaaaggaagaatttcttttcttagctgaaagttctctaagtacaaaattttcataaataaatgtatctgtggttttggattagatctccttctccacaattaatgtctaagggttatcttcggtaaccgggaaatttttattttaaaaacattattatatagtatctgatacatgcaaagtaatgcatgcaaatctgttatatgtaagttatgaaacataataaaaataaactcttgcaaacacaccaccaaaactaagaactggaatcaacgctgcagaatctttctttgtgcttttctctggttctttttttgtcataaaaagtgtaactctgctcttggtttcatattaacattcatttaatttttatgtattttttattaagtatgggttgttttgtggcttataaaattggcatcatactttctgtaactgtgtttgcttttttttcactcaacattattatgtttctaagatatctattttgtttcagctagtgtttattcattgttatcactgtataatacaatgttgtacaaatgtaaaaaatgtgtatattatcctgttgatgttatttgagttgttttggatctattcttaacaatgttttatgagcatgtattttaatgcctcctattatacacgtgcaagatttatcttaacatgtgtaaccacgattagaactgctgggtcatggggaatttgaatattcagctttaaaagataatgccaaaatctttttcaaagttacgcaagtcaactttgaaactcaaagtaactcagtcaagttgcagtcctatgattctacagcctcaccagttatatcagccaatctagttagtataaaacctcaattggtctttgtgctagtttgctagggctgccataacaaaatatcacagagtctatggcttcagtaacagattttatttttacacagttctggaggttagaagtccagaaaggtgttggcaggtttagtttctcctgaggcctctctcctttacttgaagactactgccctcctgctatgtcatcgcatggctttttcgctgtttgcacgcatccctggagtctttttcttcttataaggaatccagtcatattggattagagcctcatgtttaagaccttatttaacctaaatgacttctttaaagggcctatctccaaatgcagtcacactgaggactcaggcttcaacatatgaatttctgggaaacataattcagtctctaatagttttagtttgcatttccctaattaccaataggttgaaaatcttttcatctgtttaatagtcactatatttcctattctggaaaattctgaagaatatcttatgttcattttctatttatcttttcatacttatttctcattgttatttaagttcaatcaagttaaataggtttttggagcttgagcttgtatctaccatcttgctaatattacctgttaataagagtcgattttcttaacaaagaagaataaatgtaaaaagtttttaaatgttgtagatcaactctgttccatagaagtttctgtgataatgggaatgctctcagtgctgtctaacgttgtatccattagccacgtgtttttttgaaaaaatagatgtaaataaaataaaataaaattaaattaaaatttcagcacctgggtcaaactagcctgcatttaaagggttcaaaatccacatgtggctaatgagtgaactgtgcagctttaggtggttaggcaatggacctctacagtcccaggattttgtctttgacagtggcatagtgagatattttatgtaacagttattctggcattaaaaagaaaagttaactaccattagacccaacaatcacattactggttttatatacctagaggaatataaatcattctattataaagacacatgcatacaaatgttctttgcagcaccattcacaatagcaaagacatggaatcaacctaaatgcccatcaatgatagactggataaagaaaatgtggtacatatacaccatggaatagtatgtagccataaaaaagaatgagataatgtcttttgtaggaacatggatggagttggaggccatcatcctttgcaaactaattcaaaaggagaaaatcaaataccatatgttctcacttttttttaattatactttaagttctagggtacatgtgcacaacgtgcaggtttgttatatatgtatacatgtgccatgttggtgtgctgcacccattaactcgtcatttacattaggtatatctcctaatgctatcactcccctaaccatatgttctcacttacaagtgggagctaaatgatgagaattcctgaacacaaagaagggaacaacagacactggggccttttgagggtagagcgtgggaggagggggaggagcagaaaagataactgttggatactaggcttagtacctgggtggcaaaataatctatgaaacaaatccctttgatatgagtttacctatataacaacctgcacatgtaccactgaacctaaaataaaagtttgaaaaaaaaagaaaaaaagttagttaacctggtcatttcttacttttcaaagtaacctaacataactttcatgacatacctaaatttactaagttgtattcatatacgactacaatttatatactaaactacttcttgacataaatgttcactttgtagtaaggttcattctcccaaaacggcacttaccaaagtatcaagaggtatccttattcctgatatgctgtaatagaatgaagaccttatctggtctttagtgtaattggatgttaatctgtaccagtcttcatattcaaaaattcatattcagaattatctgctagtcccatgatggctgtctttgtttcattaagctaatataaacatgtataaataaagttttgattgttttctctcctaaaatctcctatctgtccatgtggaaatgtatctcttactttttccccctcttataagctgttcttacaatttaatcctcatgagtcttatttctcctagttctaattacttagaattttattttaaaatgtaagatatcactggtaagcccctttttagtcattttatagatgacttatagatggttggaagatattcaagacagtgtgttaaagtaataaataatactcagtaatcagaaaacctgagtcttagtcttcacccataaaaatgaaccatgtgaattcaagtaagtcatttcatatgtaaactttattctgattctaaaattgttatgatcgtttatgaaattctgtttcacttatgacaagtctcaagcctatttttaaaatctatttaaaaattatgaagactcaaatattttcccctgaaattgatattaaactgtaatcattcatcttcacttacggcatgctgtagctgcagttgatagacaaaatattatgtctcaacattgtgtacttgtatcttaaatgaacacttttgtttcaaatcatgttctacctaaattcttgatgcctttttcacatttccagttcctatgctgttacaatcaatcacttgtagtagaaaaaaatcattatttttttgtttgctaaaagctctcgttagaatatcaagttttaagttattaatacaacaaactttggaaaataagctctcataatttccaacattgatgctttgtttgactggcttttagaacaccatactctcctagttttcttcctttctcacttcacatttctttctggtctcctttgtgatgcctccatttcttagtgtttattgctagagtgccctaaaactcattcttggccctctacggttttctgtctgtgcacatgagttttattctagtcccattgcttcaataggcagatgactatgactcccatattcatacctctagccttcaccactctcccaggcttgagattcataattcccatttcccactaaatatctctactttatatatcatagacatttcagaattagcaaatacaatgaaatagtttacttttttctatcactttcactccagttgtttccatctccatttgctcaagccaaaagcttgggattcatccctaaactttcactttccaacaatttctacatgtagtccataagaaactctttccacctctaactttaaaatctgtcctggatccctctacctctcaccgtcttcaccctacagcaagccatcattgcttgcctcacctagtgcaacaggcagtctcttacaggatcttcctccttcccctcttgccacggtccttctagtttataacaagtacaatagccagaataatcttccaaagaaatttaaaccaggtaacattcctgtccaaaaccctggctcccatcacttttaaaataaaaattaaactgccttctttgacctacatggccttagtcaatgttccttctgccttactgtccaaactcatttaccactttccccctcacacactcgcctctagaatgtttttccctaaaagacttttccagcattaggacctttgcacttgttattttctgaacctggaagacctgtaagattcctcaaaataagatctcagaagatagttgcattttcattttgtggaggcatttggtgagagacattttgcgaaagatagatacattttactttggagggtatttacacgtttagcaatgagcaagtttattaaataacaaatgcaaaagtgatagagcaaaggtgtgtattttaaacagagaaatctgaggaattgtagacatgtgagttacaccatggcttcaatatttaatgcataagaatcacctgagttgagttccagacaaccatttccacccataaagattctgaacaggaaatcaagatggcctggggacatcccttttgacaaggtcttcaggtgattctgctgcatatggtttacagacaaccctttgagaaataccaagctggtatatttgttcagataaacatgggctggtgcagagcaccagtggtatgcaattgaggaccagcagattacatgaatcctgagtggcaaaagaggaagacaatccaataaagaccactacagatactatcccaagcactcttggcatggagacttgaaaatccattcatagaaatgaactgttaatcattgaattgtgctatataattttttaagttgcgaagtattaaaatatttagataaatattataaattttgtcacatattgctataaaatgatgcatacatatgtcataggtataaagatacagagcatatagatacagatatgtaaagaatatgtaatctaggcttaattatttagctgatactgcatattgtctttataacttcctaaagaaccacttctaatattctctaggaaaaaatattgtttctctccattctttaccactttcctttcctcatcctcttccttgtcctttcccttcttaaacaatttagtacaaaagccattcgatgaggcctagtaagcctttgtcaccatgggcagggtgggtatacagggtattgcagaggttgggcatttgctattaaagcccaagaagtagaaggagggtgtctgcaccgaggagcatagtgtgagctgttgaaagttattggaaggagaaggacatctacatggggaagtggccacagcaaccactcaatacagatagttatagtctgtgctaggtggggagaatgttataatggggtagaaaagtggtagcaacaataatttgttaaaatacagggagattgatctaataagtgcgaatattaaagatgaaggtaatcagtgtttgtcactgtctgaggaggaagttgaagtatgatataggcaaaagctagaatgaactctggtgctggatgaaaatgggggaatgaaagtgctggttttcaatatatttagcaaatatagaattaaacatagatgtaaggtatatatgtgtgtgactatataactgtagatgaacgtgttttcacatgtatgtatgtatgtatgtctacatacacataaatcccgtagctcagtctattgcaaaggcctgggacagctattccccaataacagtgagcaaacctagtgtccagatcttggtgtctagatacaattctcctagtgaaggaaccagagctttctggagaaatggctgattcagatcagagaaagcataagatgaccctagaacatattgttccaagaagcaagaaacatatcaaagaatgacagagagatgtcaaaggacatattggccaaattgaaaggatttcccctgggcaaatctcgaacaatctgagcttcaaaataaataataatagaaactcgttgtagttaatttaataaaatggtcaatgagtttatatcaatataaataaattgaatacattatgtttggtgagaaataggatatttacataagcacaaagtatcttgccacaaaatgtattaatgttaaaaaagaaataaataactttacagtggagaagactgggtggcaccttttaatcaaatgagtaaaattagtatcccaataagggtacaaattaaaagtttgcccaaattgtctgttgataggatgtggtgagaatagagcttcactgtgattttcctgccaaaaaacacatcttctgaatctaatcatgagacaaacacaaacagctaaatcctacaaaataactagtctgtatctttaaaggttttaaggctatgaatttcaagggaaatccaagaaaatgtaccagataaaagaaactaagacaggacaactcaatgaaatgtgattttaggctaatccttttgttattaagggcattattgggataattgacaaaacttgaagaagtctgaggattagacagtactatagtaatgtatcagtgctaattgtcagattttcttgttaatatttggatatgtttgtaggaagcgtttggggttgacagggcattgtgttgacagcttactctcaaatggcttgagaaataagccatttttactgtcttttttactgtcatttcaacgtttttgtaagtgtgagatcatatttttaaaattatgaacaaaagacaagtcatccctgagtcagataatccttcttcaggcagctagtacagttaaaagctgtttacaatggtagtgggcttctagcctagtggtgctaatctctcttgctaataccatgtaatcccagcaatatttcgtgtttttttttttttttgaggctttgggattttttttctaatgatgtttgtattagtccattctcacgctgctataaggacatacccaggactgggtaatttatgaaggaaagaggtttaactgagtcacagttccacattgctggagaggcctcaggaaacttaaaatcatggtggaaggcacctcttcacagggtggcaggagagagaatgagtgcaagcaggggaaatgccagacacttttcaaaccatcagatcttgtgagcactcactatcacgagaacagcatggggggaaccaacaccacgattcagttacctccctctgggtccctcccacaacacgtgaggattatggaattacaattcaagatgtgatttgggtgggaacacaaagccaaactgtatcaatgtttttgttttcttttgatgttcttactgtacaaatgtctataaaattagtaaagttctctgtattacaataaaatcaacaagattcatgagaatgaaaatacgttcttcaagaactttatatatttctacctgcactcaaattggaataaatgggcatgaaattcataagaaaaaacagatcataaggaactttcacactcgcaaactcaaaacagttgaacatgtttaccctgtaagagggcgatgataaagcagcagggtgacaattatatatccaaacagaaatgcaaccttttaaatcatccatgtcaggccatgtaacaactgggcaattcagcaaacaagttcaaaaaaattcctgttttcaacaatttctcaactccacacttagaaaaatgaaaaacttctctttaactctcagaaacctgggcacttatttagttaaagcaaagctgttgtctactggcctatacctggttataaatagcagcaagacatgagaagacccagggacactgaatgagctttctaaatataggtttttcttacttcaaaggccttttagaagaataccatactttgtgaaaacttgccctttatgaagggcacacagacactaaagtcagcaatttttagaccttgaaaagttttgaaatatgtctttagtttgagaacccacattttggaggcatgaaaactgaagtgcagagaaattaatatttttcccaacatcagatggcaagcaaatattgtaaaaattatggcactgaaacccctgtcttctagtcaattgaatgcagcttgtaacagattgcagtaactgcttgttttcattgccctcaaaaccacgttccttctatgcctcatccctcttgcttttgtgagaggcataatagcattacctgcaagtattagctgtaagaaatatttttcaattttacttttttgtaagtctcgaaatgctgtttctgtgttaaaaattggtgagagcattttcctttcttctttaaatgactctgcttgcatttgcagtcttttacagttgaattactgtataacagtaagtctaaaaacacattttagtagaggagattatagttggagacagcaaggtggggactggagttgtcataccttagagggaggtgggaaagagacaatgttggcttgacctaatctattataaccttccttaacccatttatgcctagtgttccattatcggaacggtaagtttgtgggagtcatttatatcccactgctcaaagtcatcaccaaaatctgatttttcaaaaaagaaatttgcaacctctggcatcaatgggctaattgaagtcccagaatgatttctgttgtttgcattgccacaggcgagggagtatagaaagcaacaagattttcatgttttcccatttcatattaatttcctaaggatttctataagacttttaaaaatatatgtaaaacagcttatttttagttttcccctactcatttgcattttaacatgttgataagtaacatttaaactcagtagttatgattaaccctgttctacaattctaaaagtactgggaagtgtgtgtgtgtgtgtatgtgtgtgtgtgtttgtgctgcctttgcaaccaatcaaatatagctctcagttgaaaaacaattattatcatatagacaataattagatttgatagtggggccagccattggtaagtttaaaagtcaccctaggtgatttatatatgcagttgggttgaacacctctattcagatgaagcacttagatggaagtatagccaagcatggctataatttcacatctgaaacctgttttatcctgagtcatttgcatagtgcttattatatgtgtttatagagtctttggttgtgttataagatattaaaagttggtgtgaattaaagaagtgacatgcaatgatgaaagcctagaagataagcaccagatcttctaattataactcaaatgagtttggttgatacaaaatattatgggaattagacacaaacattactaatgcataatgctggaataaaaatcttagagttatgtaaatatgaaagacattctatctaatttgtaccacaaggtaataggttcaagcatttttatttgtatgtatttactttgtaccctgaattgtgcagaaaacacttttctaaaatttagagtgcaaactagaaaatataaatctcgagtagttaatattgtagtcaaaggaaagattttgagatcttttaacgtctcagttcacagagacctcttcctcagatggattggtttttatttgttaagattaatgtttaccattttaaatagtttcttgaatattcctggtaatggaatagagtcataataataatttctagttctgctaagagagtcaatagtagagctgcttgatattgatagtaattttgataatatacaacatgtcatgattttccagataacaacttgtctcttggccaaaataaatacacatattgtttatcttgttaccttataaaaaatttttttattttgttagtatagcgatttgaccactttttaaattaatattttaaaatagttcagtggataatctcattttgaaatgtctattgattgatatatccattatatattttatatatatgggtatatttctcattagccaaattgatactttcttatttacacttacatttaaatcacatttctgctctacagcattttcttttctctagagcctattctactgacttaaactagcctgaaagatttgaaaattctatttaaaacaagtgtatggaaaatctttgaaataacttataacagtgtcagagaagaagagtattacacattgtactgaagagcattccattaataaaaagattaacaaaaaattctaacaacgttcagacatgtaatagcaatgaaaaacattaattataatactgaacaattacattttcggtagttaaaggggataaaaaatgctatataggaaattagcatctgcagagaagatattataaattggcagtgattatgtgtagatttaaaatatgttgaaacatgatcatagcaactgtttttctttttggttgaaaagaggcatattaaagtgtttaagcactttttcgattggagtagatatttagacactgtacagaaaatacttgcttgcagaatagcagatattaacatgtgtatgaaatgtgtgtttttaattaatgcattttcattcactcagaaaagaaaagatcgccgagtttagcttaaatgtagcattgtggcatattaaaatggcattcttagactttccacgttgctgttccttttgccttcactaaacagtgctggcctctcatttatccaagttagaaatctagatgcaattctaaaattgtcaacctagaatcctctaccttcatgcttcccactcaataaatcactaatatctgactctcctatttcaccaggcagtcttctccactgcacccctgctcccttattctcagggcctaccatctctgcctcaacctgccaatcaaagtcacttctatttcattatgagcagggccatttttaaggtttctcccatcctgggcaattgcacttttggaagctccacactacattttatcaaatatattaaaatgtatccaaatcacatatttaatataatttattacataactaagtaggagatgcatttcatgagttgtaatattagtgctgataatgttaataaaacatgcttttaatctcacttttgcattttcaaaaatattttggaagcttttttttaggtgtcaatattttcataggtctttctcaaactcatagtctctacagagtgtgcttttactatcacaaggcaaaacagccctaacagtgaggcaactgaatatgaggaacatcacctggataattaaaccagatttgtgggagatggaataggaagtgtttgtagaacaaatacagaaatcaaggaaaagatggtggtgtcaattaatactctgcataggagatcataatattcaaaacccagatactgttgagatatcaatagactatcaccctatagagtaatacctcaaaacataatgtaaactacttacatatttaaaaagaaatattgatggcaaaccattaacagaaagtgaaggaagtttataccccactgcaaacattggaaaatggtaactgtaaatggttaaatcacctattagtttcatgacttaagatttctaaacctttactatttcatcttttaaagtgagataatgagaatactgttttgagagagttgttaagaaatttaaattatataatccatatacacagatgtgatatctggcacatatgtaatatttgtttttgttattgttattattcataaggcactattaaaccgtagctgttttgttattcttatggtcattattatatcttggaacagaccagaaaatattactgagcttgattggatcctttttttgattttaaagatgaaaaagttaatatgagttattttgataactgtgtcagtgttctaatatcctttgaaaatctaagtatttatttaacataggagggcaagtcatagattaatgagaggttatagattttaaaagtatctttcttccttggactcttacagagccagtaaaggaaaagataaaacaaataatttggcaagtattatataacaaagaacaccaccagccccaggcccttaatgcttttgtgattttgatgtgaataaaccctggtcccctctctgacgtcagtactgctgctgactgggtaagacattggtcaagtcgattaacctttcgctgctttagtttcttcttttgtaatgtgcaggtaatattacttgtcacttgccaaccagcagtacttctgcagctaattgactttctcagcaggggtattgcaaagattagtggataaatgatttataaaccctttgaaatattaaatatatgatataaaaagccctagcaaaaggacagaagaaattattccatgctttaatttgctactttcgtcatatatatttgataaaaaacttaaaagaggaagccatcaacgaagtgaaaataggttagattactcgggattctagatgctttctattgctgttattttaaaaaatcttttgttataattgtgaatataagaaaagaaagtgtgctagagatcataactgtgtttatcttcttaagtttataaaaaatatttcattagacaggaaaatgaactgggtaagaataaggacacatactctcagcctagttttactatgaacaactgtatgacctcgatcaagttacttaaacaaggaggatcttgagtaagataatcaagaacaatctacataatacattttgtggatttaggaacaaaatacaaaactctgtgccatacattgtagtggattcgaaaatcaaagacccagaaatataatataaagaggtcaacatgaaaataataaattctcacataagacagaattaaatcaacacaataacaaagttatttattctacctggagatggagaaagagtgtgactggaaagataagaactggttgagaagaccaataggagaataccaagagctttggtactttaaatactttgggaggctgaggcgggtggatcacctgaggtcgggagtttgaggccagcctgaccaacatggagaaacctcgtctctactaaaaatacaaaattagctaggcatggtggcgcatgcctgtaatcccagctactcaggaggctgaggcaggagcatcacttcgacccaggaggcggaggttgcggtgagccaagatcatgccacggcactccagcctgggtaacaagagcaaaattgcatctcaaaaaaaatataaacaacaacaacaacaaagtgcagtgtaaaacgctaaatacaatttgatatggatgactattgtgaaaagactattgcaagagtgaataattatttggtgaataattatttggtgaataatctgtagtgattatttagtgtacagattatttggtgtacagattatttggtgaataatctgtagtgatagttcctgagaaaacagtcctcctaagttaatagatacatgtgtaaaattacaaggggaattaaaaataaagcagtgtagaggaagcagggaaaattagtatctacctcttttcctatatgggagtaaatgaaagaaaaagcgatgaatgtcttaaagaacatgcagggttgattgttccattgcaccccagcctgggcaacaaagtgagaccctgtctcaaaaagaaaggaaaaaaaaaaagaaaagaaagatttaaaaaatgcagagttaaaagataaaagattttataacagggaagatgtaagcaatttgcaaagtgttaaagaagtagctgaagtaaaattgtaactccagaagcaagaggcagaattgaaggaatgataatgaggaagaagatagaatcaagagcaccagtcaggtattaataatggtgggcaaaaggactcttgaataaagagatggatgaccttaaatgtgataataaagaaagaggattgaagatgaatgatgaccttggtctccacaaagttattaggtaagatttgctatggagagtaagaaagcaagatacaaataaaatttaaagagcatacaaaaaaaagaaagaaagaaattgtttttattagggatagtataggggtaaaccaggaatgagtataagaatttatgagtagctttgaggtcactcgttgcccaattataaaagtattttctaaagaaagatagtacttctaacattttaaacatttacaggtaaagagttctcattttaaagtttttacgtgttaaacattgtagggggaaaaagtatttgagtctgatctaaagaaagttcgagaggagaaattaagtaatgatgccattcggggtggggaagaaggctgacatttgcaggaatgatgcaaaagcaaggtgggggtgggcagggaactgctggaacttttgcactaagcaagtcagtggcactgaactctcctagtgatctatgtattctgcacccctacacactcacaattagtatttttttagttccaggtttacctaagaatgtacttgatgaagcagtaaaaaaaaaaattcattttcttgaatctcgacctttgagtacacatgtttttaatattcatgtgatgaaatgggacatctcatgaagcacttctgttgtgtatcaaacatgtggttatcacaagtaaagcaccttgtgcaactgtgggttgagagctgagccagacattattttcatggatcaccatttttacttgaacgaacaagtgacaggcaaactagttgttcaaacttggacatttggcagaaattttcttgaaaatgaacaaagtgagcttgtcacttctaggaaagcaaaatctaacagtgtcttttgccaatgaaaaaatctgaactttcaaacaaaaattataatttcagaaaacctattatctgcccctgtgaacttgtcagtttcccaattcttaaagactcttcagatgacatagttggtgttgccaacaagtgtgatattgtataattaaatgtgctaccgtttgggaaatttacataacccagtgtaccaatattttccagatgaccaatgtctgatagttaaaaaaaaaaaaagaaaaagaaaaaaattgcgtggacaaaagaccatttcaaactgcaagaaagacaatgggaactttctaaaggcagagtatggaaagcatattcatatgacttcagattccacattgaaaaaaagccataattatctgaaaaggctattaaaattctcctcacttttccagctaaaaaaaataatatctctgttaagccagattctcttatgtacttcaactaaaacaacatgttaagagatactgaatgcagaagcaaatatgagaaaccagatgtcttttattaagccagacatttgcaaaattaagccagagagttgcaaatgtaaatcaatgccatacttgtcactatttttttttttgctttggagaatatattttattttcattaaaatatttatataaagtgtaatgggtttattcatagtatttgaggtgaattaatacttatttaatttttttcagtttttctaatttcccatatgttaaatattggtagatttatccctggagaatgaaagctaagtggggttcttcataatttttgagcatgtaatagatatctgagaccaaaacaattcagaaatactaatgtagaccaaacactaaacacacagtaaactactcaaggtctttaaacatacttcccatgatttcacaaagtcaaagttgagaagttatataattgcattttgtaatagtggaaaaaggggaattttctttctttctttcttacttaaaaggaatcatagtattcagattaaagagaagtcttcagcgcatgctgatgacattctctccattctttcctccaagtctgtgagtctcatttcatgtgtcccatttacaggagtaaaattagcatgttacccagtcaccatttggctcatgactcaatgtcactataaaaatcattttagcaacatcataggcccaacttctagaatccatcgatgtggaacacttcagtttgtttaacgtaggagacgtaagtacatgcttttcatagcctcttgaaatctgtctaaatctgtaaattctactatagtaataccttatgcttcattctctcaaataatttgtgtgtatggaattttaaaaagaaggcacaaaaaggaaaagatcagcacagatcatgagtctcagttttgaaatccattatataaagaatttgtagagcagcaatattgcttctgttgctaaagagtaagagagtgaggctgtattaagaaaagagagagcaagattatttctaattcatagattttgattgaatttttagatgtcaggttttagagatttatgctttaaaatttaatacaactttaaatagttcagtatttaaataataaaatgtccatttccctcttttccctatcccataaggctgaatattagtataattggatcttttgtataactggatacaaaaaagtaacaccatattaccttgtctgtattcaatactatcatttggtcatgtctagaaaattccagttatagcaacatagacaggaaactctagtaaagaatcaaagtctacttttaataagttttccagattttgtcctgattatttttataaagtcagaatatgtgctagttgctggtctactaaacttccgtctgctgctgacatttatttgactctttttgaattttgtaattttggggggtgaatatctgtcaaacataatttttatggctgttctccagaatttcaaagcaaaagtacaagtcgtctatacaggtatgcttgatgtaaaatatatttatctctcagagtcatattactaaattagaagacctgtgtctaaatgcttgactgaaaaaaaaatagccactaggcaggtaaaaatatctatttttgagcacttaaggggaattcactaaaagcactataatcatagagaaaatctggagtatacaatatatattttgtttaaaaatgtaattgtatgtgttccttcattcacatatttgttgtgtgctatttgttagctattgctcttttattggaaaatagatctattgtctagggaaagaaaatataataagcaatgaaatattacttttatagtaatagctatttctattataataattatattggctactctaactggatatccagtgcttagtttctatgttactttaaaggttcagaattggatgcacatggaactaaaaatatatttcaactttacaggaataatctcttctcacaattgtctctattgtctttcattcaattgaaatgaaagctatatatgaagattttaaaagtaagcacaatatacttttatgtctttcataacctcatttcttccttcatgtgttcattacttgggagtgcactaaatgaaaattcaaagtaagttgttgcttaccctcatataagtagaattgccaccaggatcttttaaaattcccacatagataagtcataacacaagacactttcttttatatataccttctcatggaaaatgttaccacatttctctgcctcatttttggtatttcaaatcttttaaaaactattttcagcaaggagaattagatataaacccctacaaggatatgtattatcatggcagttagaaatgataatggcaaaaaaacagggacctttactgcaaagtacaatgccctttacacaaaacccaaagacatatacccatagtttaagtcatggtaatatgtatgatttagtggttacttaaaatctctgagacttattttctccatctgaaaaatgaggatttgttttcctactttacatcattgttatcagatgagaaataatagcactcgtgcttttttcaagcctgtttgtttgtttgacacggagtcttgctctgtcacccaggctgaaatgcagtgacccaatcttggctcactgcaacctccgccacccgggttcaagcgattctcctgcctcagcctcctgtgtagctgagattacaggcgtgcaccactacgcccagctaatttttgtatttttagtagagacaaggtttcaccatgttggtcagggtggtttcgaactcctgacctcttgatcagcctgcctcggcctcccaaagtgctaggattacaggcatgagccaccatgcctggcctaagcctatgtttttaaaagccatagaaagagactaagagtgaaaatcattgtgaaaagagcttgaatatctcttgtgactccacctctccttaaatatttataagatgtatttgctagattgatgtgcatgttcagttctaaacctttgaagtaatgcagaaaccaaatactgtgttggttaatggtaatgcatataatgaaaatatcttcacaattaataacactgaattattccaagttccaaaaactttattcaaactctgacttactcatagacaggctgcctggtaaagtaaaaagcatgggcaggaactttgcagacttaagttccaagtacttaattcattaactatgcgattatgggcagattaatttattaactatgtgaatatgggcagatcacttgaattatctggtactcaggtccttcatctataaaaacttctagactgaagtagatgaatttttaggatttagtaatttagtacaatcaggaagcaggaaagttttctgtggccactgataaaaggtgattaatatatttcttcctcattggtcagttctatttaacatattcttatttaacaatggctatgtgcaaacaactctgctagaaattgtatgtgattaaaatattaacaaaatgcagtaatctattgagaaggagaagtaactatagctctagttagaattaagtgccctgtagggtacaaatcaaacctttagatcgctacctgaagagatagggaaattaggtaaaagagaagatggtgtttgactgagttttgagggctaaatctactttaacaagaaagtttgttggggaaaaactgttacgggtggagtaacagacttgaaccagcacagcagcagagaaactctggaaaaatattgctcattattctaaaacataccatgtatgagagcaagtggttgaagttaaaaaaaaaaaaaaagtgagtcctttccagatcatggaaggctttaaaagaaatgctaaaaaattcagaatgtgttctataggctgtgcagcaggcttgaaaggcctttgagaaaggcaaaatggtaacacttactgcagcattttggataggttgggacgtggagaaactcagggaatagaaaaactcagcatttggttgatatgcatgttcctatgtttttcctgtgttttacagggactaaatatgactggcatcaaataaaaatcagtatgacctggcaagtgattagacatggatatcaagggagagaaatggggggaaatatattctccaacatgtgtcatgttaatgagcagtgggtaatggcattagaggtggaaggaaataaaatcaatagcatgtcttaaaaaggcaggtcaattcatccgaaaaagaaagaatggtgattacacatagaaatgttgtttgaaaaaggaagaatttttagagaatttgtaacagatgtcccgtatcttctcagaggaagatgcagagtcatctcttaaggtaggtggtgtctggtgtgtagactggaaagggtttggaatccttcccaaagagaacagcataaggaagagtcaactagaggtgaacagaagaatttctgagcaactccatccaagtgtatactaataatagagccagaaatttctagttgagccaattggcacaattttgtgactttttctggtaacacttagccacccagtactgagatcagagaaaatatactgtagtgttttcccagcagtgaagtgtaggtacgaaagtaaagataacagtagatcaaagggacttcttgatgctaataaaaaaactacataaagtagtgggtaactgattcacgtaggactggacctagaggaaactaaaaagtgattcaaggaattaaagacagcatcagtataaagaattggttcattgagtataagaggaaaagaaaaagaaaaggtggctgtgacgaggggagagaatttccagattcagaattttacaaatgaggtggttttggtttatttttgtttgtttcaccttccaacttttattttaggttcaaggggtacatatgcaggtttgttacatgaataaattgcatatttcgagggtttgtacagattattttattacccaggtaataagcatagtaccctatagttttttgatcctcaccctcctcccaccttccatcctcaaataggccctggtgtctattcttcccttctttgtgtccatttgtactcagtttttagctaccacttataagtgagaacgtgcagtgtttggttttctgttcctgcattaatttacttaggataatggccttcagctccatccacgttgctgcaacagacatgatcttgtccactgttgatgggcatttaggtggattctgtgtctttgttattgtgaaaagtgctgtgatgaacatacgtgtgcatgtgtctttatggtagaatgatttatattcctttgggtgtatacccagtaatgtgattgctgggtctaatggtagttgttagttcactgagaaatctttaaaatgctttccacagcggctgaactagtttatattcccatcagtagtgtaaaagtgttcccttttctctgcaacttcaccagcatctgttgatttttgacttattaataatagccactctgactggtgtgaggtggtatctcgtagttttgatttgcatttttctaatgattagtgatgttggccagtttttcgtatgcttgttggccacatgtgtgtcttcttttgagaagtgtctgttcatatccattgcccaatttttaaggagctgtttgcttttggctttttttttattgtatttatttatttttttaagacaaagtttcactctcgccgcccaggctggagtgcaatgggcgtgatctcacctcactgtgatctccgcctcccgggttcaagtgattctcctgtttcagcctcttgagtagctgggattacaggcacccaacaccaggcctagctaatttttgtatttttagtagagacggatttcaccatgttggtcaggctggtctcagactcctgaccccaggtgatccacccaccttggcctcccagagtgctgggattacaggcgtgagccaccgcttgttgatttaagctccttttcagttctggatattagaattttgtcagatgcataatttgagactattttctgccattctgtggtttgtttgtttactctgttcatagtttcttttgctgtgcagaagctctttagtttaattatgtcccatttgtcaatttttgcttttgtggcaattctttttggagtctttgacataaattatttgcaagggcctatgtccagaaaaatattccctatgttttcctctagagtttttacagtttcaggttttacatttaagtctttaatcaattgaaattgacttagtccttgagttgatttttgtacatggtaaaaggaaaaggtccagtcttcaatctacatgtggctagccagttatcccagcaccatttattgaagagagagtcctttagccattgcttgtttttgtcaattttgttgaagatcagatagctttaagtgtggctttatttctgggttctttaacctgattcattggtctctgtatctgtttttataccagtatcatgctgttttaggttcccatagccttgtagtatagcttaagtttgggtagcgtgatgcttctggcttttttctttttgcttagggttgctttggccatttggactcttttttggttctttacgaatttcagaaaattttttttctaattctgtggaaaatatcgttggtagtttgataggaatagcattgaatctgtgaatttgggcagtatggccattttaatgatagaaatgaaagggttttgagtaatcagtttttgtaccttttgacattttatttccaagatttaatcaagagtgtttgttactcctctcaagtaatgacttatcaaggggaacgtggggagctgtttttctggactggaagcgctatttgatcactgaaaatatttagaattgctggtgcatggtgcatagtggtaataaaaagcaaactgaattttggcccatttcattaacagactgtacagacaatgctctcacttagtgcttacccctaggatgaaccactttttacttagcaccccccacctgatctcaagttctctctggagttgaagaatgactaaaatggtattagagaaagaaaattttataatgtaaactaaatgtcaacaaactatggcatgcaggccaaatctggcccattctctatttttgttagtaaagtttgtttattacatttgttttacgtattggctatggctgcttttgtactgtaaggacaaagttgagtagttgggatagagatcatatgaccctcagagcctaaatatgtactatcaggcttgataatcctacctaaatgcccatcaacagtggacgagatcatgtctgttgcagcaacatggatggagctgaaggccattatcctaagtaaattaatgcaggaacagaaaaccaaacactgcacgttctcacgtataagtggtagctaaaaactgagtacaaatggacacaaatataatacataatactgtatattatgtaaaaatacataataatatgtattattaattattaataataattaatattattacatttaatattaatatattaatattaaatgaatattaaatattacatttaaatatgtaaaaatgtacatatttaaatatgtacattaaaggttcccagacctttgatctaaatacttaggaccagaaaaggcattacttgttttgtgaacttgtaaacaggacaattgtttcacattcatatactaagtcggtagttaaatgtttagcattgactaccattatattcacctattaattttcctttcttttgtagtccctgctatgtggatatttggtagcaatgactgatgtggaaactacatatgcagattttattgcttcaggaagaacaggtagaagaaatgcaatacatgatatcctggtttcctctgcaagtggcaacagcaatgaattagccttgaaattagcaggtcttgatatcaacaagacaggtaagtcatctggcacacatttctctatgagcatggaatgatttgcggcattttactaagagggattaaggcacgaaaagccatctttgaaagtaatctaatgtaaagagttttaaacaatctaaggcaagatgaaagtctgagactaatctcttaatcactcctgctctattttcaatgatgtctgtttagaaggcttcccactcaaatgcagagtccttaatctgattttattaatgcaatcaataaaacacatggtgtgtttttttaaatcctaatttctataaaagctgaaattgcttatgtacagtatttaacaaagttggagctcctacctttgacaatattggccacctctaacatttactaggtagatatttaacaagattcacaggtaattctgatagacttcaattctaagaacaattttagtaaaaaagagtctccagggctaattttattaagaatggaagtaaaatgatctgttacattagtaactcttaggtaaaagggtctttggtttcctattccagatagaatgggtttgtgaaaaatttgtctccttactgggccttgaattcttacccaaggagtctatcttcattaatgaaagagaaaaacaagtttgatggattaaaaaacttgacagttttacttctgagtattagaataagtcccctgatagttcctccacccatagcttttgcagatatcaaagctgaatgtgtttccctgagaagacttgtgtaaaaataacccttaaaagtaaaaagaattcatgattagggaaaccctgatattatgtgcatggaaagcacttatcacagtttctgactcttaattattcaatatgtcttcgctgttagaatttttaaggtaaaacctttagattattagaaaactgagtcagagtatatgtatatatagattaatgaaatggctcagcaacattactttaaaatatataaggatggtattttattcaatggctaaagctcagtatttcccagactggtcttttcaaattcagattaataataaaactttaacatcaccactttggaatatgtagacctgtataaatcttaggtttcattgttgtgctgttattgctaccagtagttacttcccagaacagctctgagaaagactgtatggggaattattccaatttcataacatgagatggataaatatatttttgctgcagtcttgcataagatttatattttatttttcatacaaatatgctactttaaatagtctgcattaattttagctgctcttaatattaggatatttttattcatagtacaatttaatttcttctttttctatttttcctgaagttgagaattgttagccctaagactgttttattttcctgaaaacatattaaattattataaattattgaaataataaattaaaatgtaatattaataaatataaataaaataatttcatatgcattattttacaattaaataatttaaaataatttaaattatctttatacttccaaatgtcttcttttctaaatatttttgcatgttaattgcaattcactaggctcttgcaacattttctgtttttcttaaaattataaagtccaaaaccaggaacagtatacaaagcaataactttgtttattctaagtacaaaaaactaataactgtataatatgaagatctaaaatagaaaaaatggcaattatataatgacaaattcaacgtcactaagaattgtgaggaattttttttgtaattcgtaaatgtttcagcttcattttagtttatactcaacaatattgttgcttcatgtttacctttatttgttaacaggcatctatttagcaacagtctctatgttttcagcataatgctaagccctgagaagtgtccccagacatctagagggtcccaagccccatgggagtcaagttcctcatcttgtatttatacaatcactttcatcctgaaatattctactgtcttacatatgccctaatttgacttcatttctttgattaccaaaagcttctcctgtttaccaagttcttgttgcatgcttaatttacacatctcagaaccaggccatctgcacatcatgcgagcctctcacaataaaatagtgcatgaaaattatatataatgtctggtcatacccttggtactgctttagaagaaaatatttttatgtagaagaattggttttaatttccctaaagatttaatgttgttggagtatggtgaggtgctttgtgtgtacttgctaagagtagaggagaaactgccttataacattatggtccaaagaataggccatccaacttacctgcttttatttgaattatgataacaaaccctcagcaaatattgatttgtttatattattgcaacacctgaaaacattttgtttgccaagccatactggctgcctgataacaaaatatcgcatgcagatatttgaatctgagtctagaattgccaacagcttgcacttatataaagtgacctaatatggagtgaaagcattgaaatgtttgccataccactggctaagattgctactgagggtgcagttatgagggtggttttattggaattgtgcacatgttctctaagggcagaccagaggccattgtaactatttgacaagggactggccagctgacatagtgtcctttcattttcaactattgcttttactttgaactaatagaacctctgagaaattagctgggttatcatcaagtgctataaaaaggagaaaatgcagttttaaaatatttcttcaaataagacaatcaggcataaaaaggtaaacatgctcccacttctgatttctacttaaagacatttctgatttctgcaacctgtgaaactatacctaagtgacatgacctggccttgagatttctgagctatttatccaaagcttggctgatcactaactactctgaaaatttgaatattattttgtttttgagccgtgctgtcccaagttcacagaattaatcagtccttgaaaacttaagctgttttcttagtggtgaactgactaccaagaaaatatacttgttccttcaaggtttcaggcctatttagtatttctgaagttaccaatatgacatattgacagttggtaaataaaagcaatcatttttattttgcctttattctgttttcgtttttcttttgcagaaggtgaagaagatgcacaacgaagttctacagaacaaagtggggaagcccagggagaagcagcaaaatctgaaagctaacaccccactttgaccctcgaccacacctgaaaatgtctcaaatctccaggagtatctggaatgcatttgtttccatgagtgaaaagaggaaaaagaaaatggctgtgctgcattgcaggaacctgctcattatcatgttaaaaatgagggcagaggctgtggctgcaggcagacttttccctacctctgtcattagcaatggttgaaatcatgtggcttgtgtttgggcgtcatttttgtatggatcctttcacttgatcatatgacgaaatgcttatagagagtagctccgacctagatgatgattcttcctgtagcatctggcccctcacaatgtcagaggatttaattgtgtctaattgcgaagggttgattgaaccccagagtttaaatatctctggctcaagtgttcacccagtaaaagaaagatccagaaagcactgtttttagcattacgtatctgtgtgttactgctgtgttatttacactgttttgtattgtacaatatatatgctcagcactgcccccttctctgattgcttatgaaaaacaaaatgatgtacattactgtgaatttttataccactcatttttaaaagggctgtcttttcattttagttttccatactgtggtggtgtacacaggatagaacacccttttttaaaacacagtctttccccttgctcattgtatgttgatgagttgattaagtctaacagattcatcaagactccattgctttattatagagacatttgaaaatatccattaatgtgaatatcacctgaattcagtctgtttggtgtctgcacagactggaattcaatctgtcaaatttgttttattctcaagtggagaacttctcccacataatatatatatatatatatattttaatttatgagaattttggacaattggaaaggtagaaaagaaaagccaagatcatactaaggactggaaatattttgttctatggaatcaaatttctcacaatgctgtatgatactatttaaatttggaggacaacttatcttcactaagctgaatcaggtggagaaagtaatctccttgcaatcatgtggacaccaatcacaaaagtaaagccctggtgttgtgttttcatgtcttttttcagccctctcagatccaaatgttattatgcactttttaatgtttgtaaacttttactaataattagtgtgaattgcattctgatacaataatgattatcattagaagctaacaaaattctcattaatactgtgtttgatggcctctgctgtgttttaacatcgtgcttcttatatggaaagtttttgtgagctgtgtaatccctctggtcagtattatgaaatcatttgtcagtggtaataaataaggaaccagtaatatgccaatggttcatgaattactggacaaatagcagacaatgggagtccctttacaataacgagcccacttagctgtccttgagggcttagataccttgccacgtgaagtaggtagagcagcatttcaataggtaatttgtgtggttgtgccagaaactcagcccttctatgtaattacatacaggataaaaggtaagtctgctcacttctccttctacagggcatttcaactgactggaataagggcatggttgcatttagtactcaatcagatattactagaaaaaaaattaataatgtgagcctttccgagagcagaacgaggaaagattaaattttagaatgcttccttctgtctaatccatcaggggccaaaatgcccagtaaaattcaaacacatcacctattaatagacttacaagtgagaaaagaggttcctagggttattttaggcaatccctggtaaactgtttaaaccatcaaacccctacagtcagttttcagtatcctcatttaatattttaataggtttcttgtgaatttaaacttctcttctttcttaaggttgtgaaattccaaactgattttatgtgattttgaaaagtttagaaccagtgctgagtctatgtggagggtttatattcctatgtgatatactgttattaatgcatgtggtgccatgcttgtctttaaatatataaatagtgctaaattgcaaagtcatatggagctttggatttagtttgacttcttactactgctttgtctgctatattcaaacccaaaggcattcccaagctagggagataaaaattaattttctaaaatgtccacatcctatacattttgcttattcatggcatctttcaaattttattttagtttcctttatttgccaagaatacatatggatttgaatttttaaggagagaaggaaagggtaggaaaccagggccttgggtttagtaacaggcattggatgtctattaaccaactattcttacgctaatggctttgcagctcctattctcccatttgatcctcaaacaattctattagagtggtatttttatccaatttcacagattaaaatataagcactcaataaaatataacctttagaagcttaaaaagctagtaagtgatgaactgaggatttgaacccatgtttgtcaccaaggagctttccagggcacatgtcataaaattagagccaactgcagagctgtaagggaacttttagagatgaacttcttcagcctccatattttacagaaggaaactgaatcccagaaggagaaattgccgttctcaaggctccctggatgggtaataacacagatatgagtaggtcacataaagtatatcttttttaaaaaaaagaaattcaattatgtcttatttggggggtatatttcccagaagatatttttctggcatgtggtctgtaaacacagcatgattcatattttttatgtttcatgctactcattttgtttaattaccaacaaacatggggactttggctttttgacttatttgcaacaagcatgaaattgttaaatttaccttttatcaattgtaatcatcctatgccaacatattatcataaattcatagaaatatttttaaaaataaataacagacattgaaatccaattcttagataatactcccagaacagccaatggtaaatgccctatacttgagtcttacttagatgctgtggtaatgcaccattttagaagatgaatgatactgctatttctcttcagggaaacaataatggataaagaaatgtaactgccgggcagcaaagcttctaagtgaaacctgtagtagcagtagtagtagggagaaaatgtgtagtcatcaagtgaaaataggaaaggatctatgatttatgatgtcttaatagaccctaaattgttctttaattacaagagtggcagtctctgaagtcatttgtgagcttgtatgacttttgtatttagcaatgttgcatgctcacataattgaaaattaaaagtaacacatttttctgaaatgta

SEQ ID NO: 8 - DNA, 19420 bp, Homo sapiens
  source 1..19420: mol_type = other DNA
actggccctgtccttccatctgcccagagaggagcatctggatcaaggtgctggccatgtcccagctggtggaatgcgtccccaacttttcggaggggaagaaccaggaggtgaggcccgaggagctggtcaagcatctagggctgatggggcagcttgagtggctaaggcccaggccatggaggaggtggtgggcttggtgtcccgggtcgtcttcccaggatgggcagagccgctgcccgtgggccccaaggacatcccgtggctcagggccctggggagtgcctgacccaggggtgggtggaacacgactggtgcttgtgggggctgaggcttggctgtggcttcaggggcctttcgggtgctttcggtggggggttgggcagatctctgggcctcaaagggccttggtgctcccccctgaaaatggggctcctgccactgactgaaagggctgtgtgaggccacacgaggtggcccagcatggtccccactgccgcctctccatctccactggagttagcttgctgagcccccaccctgcagccaccatcctcactggacccaaaacgaagtaggcacagagggggcagcaggcccccaggtccggcctctcgccttccacagccctgaggtccaggctcctccgggaacaaacgcaggccctaagggccacctggaaggcctcccagagcgcagcaccaggccacaggggtcacccgcaggggtgcagggaggcctcgtcatgccgggattccagccagcaccaaggccctgggacagggcaagatttggggctgagcccctgctcccagcagtcctgccacccggaaggttctaggcccttcaggcccctcccccatgctggtgatctgtccctcccctgctcgggggtgggggtcccggcccctctgtgacctgcgcctgtggtcaccttcttggatccccggccacgtctctggcatctgtctgtcggagcagagcccgtgagtctctcctggaggcaccacctgcagccccttgtggggactgtgcttgggctggagtgactgtggctgctgtgagggttcccgggcggccgctgtgtgcgggcactttcggtgggagctcagcttgtcggagagcccccaaaggcttggcccgcctcctcagcccccatttgtgtctcggggtgcagccacctccaagctccttttccttctttcaaacggggagactgaggtgtgggggccgggcctgtgtcccaggtgatcgacgccatctctggagccatcacacagaccccgggctgcgtgctgctggatgtggacgcaggcccttccaccaaccgcaccgtgtacaccttcgtggggccgccggagtgcgtggtggagggggccctcaacgctgcccgggtagcttcccgacttatcgacatgagcaggcaccaaggtgaggtctctgggctctcctgtggctgccgtgtctcagaatgtcagggccgagccctgtcctggtgtcctgggagagggggtaggcccggggcccaggcttggaacgtggggtccagtggggctggctctggctctcctaggaggaccctggagtgtgggggtcatggcccccatcctgcctgcagggctgtgctctgggggacccccaggtcgccacgctcccacagcaccgggccaccttcacggctgggtggggggagggggccacgccggggaaggtttgtgggccccgtccacctgcccactcgtcaagggggctgagagccagtcttggagcaggcactggtgggggaagggctgcctggaagctgacctgtcaacagcccacaagccaaacacctcggtgggcaggcagggccaaaggtgtgtggacacacgggcgctggccaggggctgggctgtgggccgctcatgagaggccagggatccacagtgatcctgaggggtggatggatgagaagcttatctctaagtggccagccctgggcggtggcggcaaaggcgggggaggctggcgtcccctggggtgggcgccgacccacggcttggtgtagccacagcgagggactcagctagtgagaagaatgctctggaaacgcagagtggattctcggcttcaggggagggggttggggtggccggaacccagcctcgagcgccccctcttggcctggccggggctgcctgagagctgagctttgcacccctttcaaagttatttttgtgagtgttaggagagggacaggtttatcccagagatgccagaccacccgctcaggtgctgctgctcctgggctgaaggacctcccccacactggctgggaggacggtgcgggaacttccgttgtcccgggagggctggtgctgccgctggggcagggctgggagcgcccagggccggcctcctccctgtgggtcagtgtgagcagcttgctgggtgtgtggactgggggctgcccaggccggagaggacagagggtccgagaaccccgtggagctcccacccgctcccacacctggcctcctgcccggcctcgccgtctctctgcaggagagcacccccgcatgggggccctagacgtctgccccttcatccccgtgaggggcgtcagcgtggatgagtgtgtgctctgcgcccaggcctttggccagaggctggcagaggagctggacgtgccaggtgagcgtgcccccccgcccccctcactctgctcccgtctcattggtgtgggttattggctccttctgtatcccccagttccctgcccttgactgctcttgcaagggcagagtgttccaaaaagccaacatgcagaagcgcagctccctcaataccgaaataaacgcagcctcgcctgcggccgtgcaggcccggggcctcctcagactacaccgcagagcagctgcacaggcaaaccaagagccttaaagtccacgccttctagagcagaataatttcactttgggaaattaactaaatcaagaaaatgatatgaaacaaacagagacaaacgggacaaagtgcatacccacccctaggctgcaccaacccagcgctcctggaaagaaatcccgaggcagggacgtaggtcacagtcacgccagcgtgcagggcacacgtaacccccgtcacggtcacgccggcatgcagggcacacgtaacccccgtcacggtcatgccagtccccccgaaggaaatcccgacgcagggcccacgtcacagtcacactggtgtgcgggttcacgagtttttcctcttctctgccgttatatttatgtggttgcttgcggttctgtttatcatacaaagaaaacagaagcatgaacgtcctgccgttagcatgtcccacatgttccatcctaaccctgcaattcgccttttcagggccctctgaggagggggtgggcaggggtgctggcccacactgagggtccactgggaccacccgcatccatccaaggcggagaacgggcactccccaggagagggtgcagtagaggcccattcctgggttaggctggagggagcccctccacctgcgtcctccaggaactgagtcctggaccccctgccggtccaggcctgaccgccgggctctcctgcagtttacctgtacggcgaggcagccaggatggacagtcgccggaccctgccggccatccgggccggggagtacgaggccctccctaagaaggtgcccccaccccgggcggtcgggcctgggaaggaggtggacctgcccctttgtcctggctggggtggctgggccgggcccctccttcccgggaccccggggggctgttccctcccgtgggggatgtctcaccccagagcgaacttgctcacagctccagcaggccgactgggcgcccgactttggtcccagctcctttgtccccagttggggggccacggccacgggggcgaggaagttcctcattgcttttaacatcaacctgctcggcacaaaggagcaagcccaccgcatcgcgctcaacctgcgggagcagggccgcgggaaggaccaggtgaccccgttcactgaccccatggagccccacccagcccctcgggaaagggttagaggctgagagcctcaggcggggaggtcggtggggatggggcaccggccggacagggttcggcctcccacctgcagaccggcccagcctccgcgtccacaccgtgcggggaccgcgcaggtcggcaggtcaggggcggagtgaagctggggagctctggcctcctggggattttccagggaacgaggcaggacttccctttgttaacatgtggcagcatttccatactgctgggaaacagcgacttccggagtcccaggtgccctcaggggccccccatatccctccagatgccttgggagccccgacacccctacaaaccttcaggtgcccccaggcctttccctccacgtctgcacagcagtggtcacccggtctgagcgtcactccgggtatagatacccggagaaagcgggggggaccacctgcccatctgttccccactcagagaccccggtcccacaaacagccaaggtcctgggacccggcttcccgacctgcagactcagcacaaaagcacagggacctctaagtcctgctttaggccccggccaagggcagaggtcagagtccccccacgtggactcagtcaccccgacaagtgcggggctgaggggacttgtcgggagcggagcagatgggatgggagaacggcatgggggtgcctggggccccacccctcagcattcccccaacatctaggacacagcgtggctggaaggcagggcctaggctgggcgggggcctgccggggtgggcctccggtgtctgacccttggggcctccgtttccctgtggcaagcgaagtttctctggccctccccggccagctcagtgagggacggaggagaaccacagcacccacccaggcacaggctcctccccgtccagctggggaatgcaagtgccaggagagactggcagggccaggcaggatgagcttcctagtccaggctggggaacgctcttcctttgcagccaggacgtctgaagaaagttcagggcattggctggtacctggatgagaagaacctggctcaggtgtccaccaatcttctggactttgaggtcacggcactgcacacggtctacgaggagacctgccgagaagcacaggtgagcccgggagcagccgctgctgctgtgaggggcgagccgatctgtcccgtgggcagggcgggggccccacatcctccagccagggccattctccagccagcccccagggggtgacgctgcctgtgccttggcaggagctgagcctcccagtggtgggctcacagctggtgggcctggtgcccctgaaggctctgctggatgcggccgccttctactgcgagaaggagaacctcttcatcctggaggaggagcagcggatcaggctggtgggccgggctgccgaggaagggtcggacaggggcgtgcagggagggtggggaggcggtggcggagctcacagccctggggcgcagcttccctccccctcctcccccttcattttattgacttgtgttcagaagatgagatttcactttttattttggacaccttattgaggtttttttgtgacctatgatatgctcagctgtgcaaattccacggagaggacaccccaccctttctgcttggtcttgcctcctgggccggccatgctcccgtggaggggcctgtgcctcctctcaccacctccatcggggcgtcctgcacccctggaactggcagctcatggatgtgtgtgcctttagctatgggacttagatccccatccacggagcggctccttcagaaagtgattccttttgtcttgtggacacctgggcctcaaggcttctggagtctgggttccaccggggcctcaggtcctgctggggtgtggcagcgtctgcagagccgctgtccgccttggtctgtcctttcactcgaggtcactgcagagccgctgtccgccttggtctgtcctttcactcaaggtcactttgttttaggtgtgtttttcgcaataagcacaatccacttaactggattttttggggacgttttgtctgtttgtgtttttactgatttagctctcgtgacttgtggattccgtccttgtttagtctcgggcatattttcttctattagatcgctgacccagttatttagttctctagctgtaggaccccgtgatgctgcagcagctttgatgtcttctctgcctccgtctttactttctcttccactcctttcctctggattcacagtggttttccaaaacccagcctcaatcattggtgcgtttgtggccttgtctgttgtattcttggctgttaacaaaattttttgtgactttacattttgtataatttcttacagagaagatacaggtggccctccactcctgcctcccacccatattttccaagtgcttgcattttgccccatttatttgtgtataatcatattatatttttttccggactatttaaaagttgggttgaagacattgtactcttttacccctaatttattaaggctgtgtttcttaagaacagggacattctcttacataaccacagtgtaattatcaaaatcaggaaattcaacactgatacaatcctagtatctaataatcctcaggccataatcaaattgcttcagtgtcccagtgattcccatcatagcgatttctcctccaatccgtgatccagttcacgtaacacagagcactgagccaaccttttctcctttcttccaactgttcctgtcttccttgtccttcattgaccttgacatagtttcaaaggacagacttttaaaagcgcctcagtggggactagtctgatgttgcttgtggccagatgtagttgtgcatttttattttaatttaatttgttacttcttttgagacagggtcttgctctgtcacccaggctggagtgcagtggcacaatcacagctcactgcagccccaaactccagggctcaggtgatcttcccacctcagcctctcaaagtgctgggattacaggcaaggaccactatgtagtcctggctaattttgtacagatggggttttgctctattgcccaggctggtctcaaactcctggactcaagcaatccactcacgtcagcctcctaaaagtgttgggacgacaggtgtgcaccaacacgcccagccagttacgcatttttggcaggaaaagcatagatggtattgtgtcctcctcagagacgccgactccccatgatgctcattttctcagggtgccgacgtggacccgtcacttgccaaggcgacccccttcctcctggacccttcactgcaatgttactatttttccttttgcaattaatacgttgtggggagtacttgaaggtgtttaaagtattgagtaggtaaatacctgtttattactgaaattccagagttttaggagccagtgacagcattccaacgtcatcctttctgtctaagcagcagctgtcgcttctccacatttccttgtcttcttatgtgtgaggccccgtctgctttccagtgtggcgttttgtcttcttcttttttttttttttttttgagatggagcctcactttgtcacccaggccggagtgcagtggtgtgatctcggctcactgcaacctccacctcccggattgaagcagttctctgcctcagcctctcgagtagctgggattacaggcgtgtgccaccgcacttggctaatttttgtattttttttttttagtagagacggggtttcaccatcttggccaggctggtcttgaactcctgacctcgtgatccgtccgcctcagcctcccaaagcactgggattacaggcgtgagccaccgtgactggctggggttttgtcttctttacctgaagggccccatgcctgcggcctgcacaggtctggctgtgcccgtggctgcgtgctgcctccttgtggtgaggctgctttgctttgtgttgtgtgatttttgattgccagtgcatgctctgtggaattttatctatggtaattcttggacacctgggttcaaagttttctcctccaaggagggtttgtgctggcgcttgtggacactgcctcacaggaccccctgaagctgagtttttggcttggagttctggaaccacacaagagtgaattcggtgtcgggtgaggcctgcagccctgtcagggtggcttgtgattaggaattcccaggagatttttttttttttcctgcttcacccaaagggaaggcagggactgggaagtacctcaactgtttcctctggcgggtggctgtttctaattcatccttgggggtgtcaccttccaggggtctccagtcggaccccactctgaaggccccagacctcccccactcatcaggggctgccagagaggggcagttgcccccagggcagacccagctccaggctggcaggcctttccggactcgtctttctggtcgtgtctggtttcgaatgatgtcctgtctgctagcttagccaggcctttaaaatgcccggcatcttcctggggttttctgcggaaggaggctttgccttgtggcttgctggttctatgccacggggaggcactctccaccccgcccggctgctgtccgtctctgtggggtggggtgggggtcgcatagccaacgtgttctgaatgggtttcccagaatgaattctaatcttaaatgggactgtcacaactttattttgaatttaggtaaaactcacttttgtggcatacaagtttatgtgtgggtgacttggggctgttcctcagcttttgaggacttgttagatgtgaagacttggtgaattaaaatctttcccgcccgtcagcgatggggcagtggtgctggggggcggcgaagcatgagcagcagtttgctgaggggtccccagggggcaactcctttctctgggcctcaggttccccaagggcaactcagggtgatggctgtttccagaagcctgtacggggtgcctgctggggcggggcccacagggctcctggcggggcagaggtggggggtgccagccacgcccctgccctgctccccgcaaaagcacctgtgtgctcggggcagggggcggctgccgcaagggtgggacccgcgggttccgaggctttcctggtggtggagacgcgccgaggccgtttccactccaagccccttttccaggtggtgagccggctgggcctggactccctgtgccccttcagccctaaggagcggatcatcgagtgagcctctgccctcccgccctcttctcacccctcccgggctctgcctctcgggccttgcggggcgctggggtccctgcgtggagacccggctgagtcctcccagcgcctccctttgggcgcctactcggcctgcgccaagccggggtctgggggctgaggggggcacagagaccccggccgggtccccgcaggttctcagccgagtggtcacctccccgtgggtgcagacgggcgtggggcctggggccgccccgggaggactgcgctccccccaccaaccccggccagacccgctgagccgcgcccaccctgcaggtacctggtccctgagcgcgggcctgagcgaggcctgggcagcaagtccctgcgcgccttcgtgggggaggtgggtgcccgctctgcggcccccgggggcggctcggtggcggcggccgctgcggccatggtgagcgcggggggaggggcaggggaggcgcagttgttggggggagggcggggagggggaagggcgctgttggggggagggcacggggtggggagggcgcggtggggccgccctgggtggagacgtgggggccacacgggtgggacccccgcagggatcacccgggcccctggctcttcctggggtcggtcccgggccgtctggggtccctgcgacccccacatccacccctctcgcagggtgcggcgctgggctccatggtgggcctcatgacctacgggcggcgccaattccagtccctggacacgacgatgcggcgcctgatcccgcccttccgcgaggcttcggccaagctaaccacgctggtggatgccgacgccgaggccttcaccgcctacctggtgagtggcggccacagcagggctccccgggccccaccaacagcgaacccccagctggggccccagtgagaagcgggtcagcctccggctggggaggggctggggaccaggaggggcctgagggcgtcaccactggccgctgtctggaccttgaccaccagcaccgccctcaccccggcaagtgcttgggcccagcagggtttgagggttcggccagggtgaccccacattcacaggccatggcagccggtacaagggaacaggcccctcccagcaggggagccaggagcccaggcttgggggaccccacagacctggagcaaggcagggcccttctttagaagcctgcaattccaggaaaggaggcctgcaagaatctcaggaacacagtgatgagtgctctcaggcaggccagagacgacccgtttcagccacagcataagacagaaacaccatcttcagataacacccactcaggcaggcagtgaccccacctccctccaaacgggacaggaacatgagcatcagctggcaggatgtgcccacagatgggtgctgggtgctcagagcctagggcaggggccagagagcctgggaaagggcagtgacaaggtcaggatgctcccaagcagttccagcccaggagaggacaggagggaagggcagaaaagagagagagagggaggggagagagaagagagggagagtggggagagaggcagatggcggagagagagagggagggagggatggggagggagggagggggaggagagggagagggggagagagggagggggagagacagagagagagggagagggagggagagagggagggagacagagggaggaggggggagagagggagggggaaaaggggagagagggagagggggagagagggagggagaggggaggagggaaaggggagggagagggggagaggggggagagaggggagagagggagagggggaaagaggggagggagggaggggggagagaggtaggtggagagagagggagggagagagagggagagaggggagagaggtgtaggggccagccctacagggtctgtgggtttttctccccgtgtgtagagatgagagattatagaaataaagacacaagacaaagagaagaaaagacagctgggcccgggggaccactaccactaagacacggagaccggtagtggccctgaatgcctggctgcgctgttatttattggatacaaagcaaaagaggcagggtaaagagtgtgagtcatctttaatgattgataaggtcacgtgagtcacatgtccaccgcacaggggccccttccctgttaggtagctgaggcagagagagagaggacagctcacatcattttttttaatcctctttttagaaagattaaagactaatacttttactaagtttgctactgttatctagagggcggagccaggtgtacagagtggaacataaaagtgaaacaggagcatgagctctaaagcacagcatcacagggagacgattaggcctcgggataactgcgggtgggccctttacaagaggtggtggaccagagtcttcttcaaactcccctggagaaagggagactgccttttccgatctgctaagtagcggatgcttttctttggcactgacactaccatagaccatgctccgcttggtaacgggcgccttcccagacgctggccttaccgctagaccaaggagccctctagtggccctgcccaggcctgacaaagagctcacactcgttttttggtcactttttagcgtgccccttcaactcctatctgtgtatggcctggtttttcctaggttatgattgcagagcaaagattattataatgttaaagagtaattgctacaaactaatgattaataattatatataatcatatctatgatctatatctagtacaactcttgttattttatatattttattgtactaaaacagctcgtgccctcggtctcttgcctgggcacctggctggcttgccgcccacaagagggagatggggagggggggtagggagagagggaggggagtggggagagagggaggtggggagagagacagggagggacagagtgggagggagggagagagaaacatgtgccccagcctctggagcagggcggtgggggcgcctgtgtttctgggagggccacaagacccccagccctaagttgggaagtctaccttacaaggctgggtgagaaaggcaggccccaaatgcacgtggaatccacacacaggcacagagggagccaagatgagggcctcggataaacagtcccggatttgcagagggagtcgcctgagggtcccgttctggtcctgtggagaggtgaagctggctgggcttctgggtctggtggggacttggagaacttttctgtctagctaaaggtttgtaaacacaccagtcagcactgtgtctagctactggggtgggaacttggagaacttctctgtctagctaaagtattgtaaaaacgcaccagtcagtgctctgtgtctagctaaaggtttgtaaacgcaccaatcagcactctttaaaaacggaccaatcagcactctgtaaaatggaccaatcagcactctgtaaagtggaccaatcagcaggatgtgggcggggccaaataagggcataaaagctggccaccgaaaccagcaagcgccaaccgtggcgggttctgttccaagctgtgggggctttgttcttttgctcttcgaactaaatcttgctgctgcttactctttgggccttcgctacctttacgacctgtaacactcactgccaaggtgtgtagcttcactcctcaagtcagcgagaccaccaacccaccgggaggagctaacagctgtgctacgcgccacctgtaagagctgtaacactcgctgcgaaggtcggcggcctcacggggaggaagaaacagctcccgacgcgccacctgtaagagcttaacgctcactgtgaaggtcggcggcctcacggggaggaagaaacagctcccgacgcgccacctgtaagagcttatggctcactgtgaaggtctgcggcctcaccgggaggaagaaacagctcccgacgcgccacctgtaagagctcactgagaaggtctccggcttcactcctgaagtcaggcaagaccacgaacccgccagaaggaagaaactccggacgtatctgaacatcagaaggaaccaattccggacacactgtttgcagggaggtgtagacgctgatcaccgtttccagtcattttaaaaattcaggttttatttatttactttttacagtagataggcccttcgggggttcaccccgccttcgccacagcccgcccagtgctcgcctctcttgctgcctcagagctccgcctttccttcccctcgcacacagccccgcccgctcccagcctggccccttgggttttccactgggggaagcacccccctccccgggggggcccagggcacccaacacctgcttgcagaaccctgctttctgggatgcgcttctcattaccgggcaggttaagcatgttccgtacatttagcagtggtttttacttcttttccaggaagttatctggtgaatattttttgactccttttatcttagtttctcttggggctttcgctgccttctagtattttttttttttaataggggaggcaggccttgttctgggctcagctttccccgtttgttgttcgtctttggactttgcgtgtggggcttctgacaatgactcttaatctttatgtcgtggaatgtgtcaatcctgactttatattttttgggtcttgtatcacagttcaaatggcctccccagaacaagatgatcttttctatactttaatgggttgatgaactttagacccggacaggcatttgaagacagtcatgaatttaagtataaatattagaaataggccaggcatgatagctcacacctgtaatcctagcattttggaaaaccaaggtgggcaaatcccttgagctcaggtgtttgaaaccagcctagaccacacaccaagaccctgtatttacccacccaaaaagaaaaaaaaaaaataaagccaggcgtggtagcaggtacctgtggtcccagctactcaggaggcttaagtgggggtagcttgaggccaggagtttgaggctgcagtgagtcgtgattgcaccactgcactctagcctgggcaacagaacgacaccctgtctctaatgtaaacatatgtatataaaacataggaacaattttatgtttagaaatttaaaataaggtgaataattaaaaaacaagtaggaaaagtacatagatgaaaatgtaatcaagggacaggaaggaaacaagacgtgtggtttagagaaccatgagcggggacagtgagactgtgctaggcatcagtggtcgaaatcagtggattggtttacgctccctgtgagccacgtgaaggtggacggggagtgctggattggtttacgctccctgtgagcaatgtgaaggcagacggggagtgctggattggtttacgctccctgtgagcaatgtgaaggctgacggggagtgctggattggtttacgctccctgtgagccacgtgaaggtggacggggagtgctgggttggtttacgctccctgtgagcaatgtgaaggcagacggggagtgctggattggtttacactccctgtgagccacgtgaaggtggacggggagtgctgggtgggtttacactccctgtgagccacgtgaaggtggacgggggagtgctggattggtttacactccctgtgagccacgtgaaggtggacggggagtgctgggttggtttacactccctctgagcaatgcgaaggtggacggggagggctgggttgatttacattccctgcgaacaatgtgaaggtggacgaggagtgctgggttggtttacactccctgtgagccacgcgaaggtggacggggagtgctggattggtttacactccctgtgagccacgtgaaggtggacgggggagtgctgggttggtttacactccctctgagcaatgcgaaggtggacggggagggctgggttgatttacattccctgtgaacaatgtgaaggtggacggggagtgctgcattggtttacgcaccctgtgaggcacgtgaaggtggacggggagtgctgggttggtgtacactccctgtgagcaatgtgaaggtggacggggagtgctggattggtttatgctccctctgagcaatgcaaaggtcgacttttgaaaaacataaggagatatctgtaccttgcaccaaatacataagtaatttccagatggaatagaaaactgtatttccccaccaccaacacaaccaagcctcacgataaatcacagaaaacaaaacggaccgggcgggcaggcctcggccggacgcagatgaggccacctaaagcacacccttggccaagatctgcccagggagaccatggacaccgcaaggcctgggtgtgagagagtgttcgtagcgcgagtcgcagcttgaggatggctgtcctgcctccgcctgcaactgctacagacccttgtgcagaggacagcctgggagaggggctgcagccaggaggcctggtctggatgatgccccagccagtcagggagacactgggcatttctgttcctcgatcactgctgtcggaatggtcaaaggatccagatctggctggcgcccagggagcatttgctctcatccatggtcgagggtaggggctgttgatgatgactttctggtggagagttggctgaatcttccaagatgaagtgagcatattccccactgagaaccccttggccagggctctggccacagtccgtgtgagtagggctcccagtgggtccttggaaggttggtgtgtggtcccagctgtgctcttccacacggggtgggtccgaggagccgagtgccttacggtgacgccgtgagctacacacatgagcacctaggaaaggccagtgcctgtgaccggggcagggacatgaggggctttgaggtttgctcttggtccttctgcacagtctgagcctcttatgcccaggcttgggggcggtgcagctgcttgtgttggagacacaggcccagagccactcctgcctacaggttctgagggctcaggggacctcctgggccctcaggctctttagctgagaataagggccctgagggaactacctgcttctcacatccccgggtctctgaccatctgctgtgtgccccgaccccccctaccctgctcctccaccaagcctgatgctaagggctataaaccactggcccaacagaagcttggttcccagagaactggtccctgcctgggacatgctccttgctacagccccttgtgggagctcagagggcatggctgctccccctacggtccctcgcccagtggttctgtctctttatggcaggaagcaatgaggctccccaagaacacacctgaggaaaaggacaggtgagcctggagggccggccgcaccgtgggcctctgtgtctggggagttggtggccaggatcccgagtacctgggtgctgtgacggggcgtggttggcctgggcgtgctgggtgtttgggaatgacttcccatcgcccgcttctgcagcctgctcagccctgttggggtgcagtgtgtccactgcctgcctgtgtgtgccgctgtgctcaggctctcctcttgctcctttcaggcgcacggcggccctacaggagggtctgaggcgggcagtctctgtgccgctgacgctggcggagacggtggcctcgctgtggccggccctgcaggaactggcccggtgtgggaacctggcctgccggtcagacctccaggtaggggggcccgggggaccccaggcctcctgccgcaaagcaggaagcagctgttggggctgagttgctggagagcacggtggttggctgggctgagccaggtagggagacctcacttcacgggcagttcccggggctttggcctcctccaacagggccggggtgtccgctgccttctaagatctcgctcacggcggcaccacagacggagacccaaatgtgtctgcagagcccaccctgaccactgtataagtgtatactcccccaagaccccttgtatcacccccactgtcttgttctagaaaacacctatgtcagcccaggcacaatggttctcgcctgtggtcccagcactttgggaggctgaggcgggaggatcacttgaatagaggaggtcgagaccagcctgggcaacatagtgggaccctggctgtacaatagatacatatgagccaggcacggtggtgcctgtggtcccagctacttgggaggctgaggcaggagaattgcttgagcacaggaggtcaaggctgcagtgagccgtgatcacaccactgcgctccagccttggtgacagagcaagaccctgggtcaaaaacaacaaaacacgagaaagcacacaaggcagctcttggaagtagatgcctcacactgacaggggccacagctgggcagagggtcccagagaaggagcgtctctctcatgggctcagcactttctgcagctgccctaagacctcatggtcttcgggttctttataggaaagacgcctcttttcagcatctggtcccagagaagtgtcccctcagtccctgggaagtgtccctgggcagtgggcgggccgttagcctgaagctgcctccgggggccctccaggggatgactttgtctctagaactgtggtcctggttcctagagtggcggagagcctccagtgtgactgctcccaggcctcctgtggggctgagccctgcttggataagagaaagttttgttttctaagctcagtggtggggcttagccctctgtggggcgaaagcgggggctgcgctgggctccttgtgaggaggaggacgaagtccggcctgtcccagagcccgtcaggcagagaccctccttccggcagtttgctcagccttgatccatgtaggggctccctggggtccttgcaggtggcggccaaagccctggagatgggcgtgtttggcgcatatttcaacgtgctcatcaacctgagggacatcacagacgaggcatttaaggaccaggtgagcaggaggcaggtgtggtgcccggaccccacgtgggggcctggattcacagcctcagggtgattgccgactggctgtgggcagtgggggtcggaggttgctgcccagcaagctgggctgaagactggaactaccagacccctctttccctgtgtccatcagatccaccatcgtgtttccagcctcctgcaggaagccaagacccaggctgcactggtgctggactgcttggagacccggcaggagtgacggtgcgggaggcctctccgggctctgtggcccctccctcgcccatccccagagggcagagctgtgacctcggtggggacacagcttgttcgtgtggggcccggagggtaggtgggcaggcagcggggcatcgcctgggaatggaggcgctggcagggacagaaggcccctagtcccatgtgacctccagtaaagttttggcaccaaacctgtgttgtgtgttggcggttttgggggcagggctgagagctgagctgcgggtcttggggcaggagcaggacatatggtcagtggcccatgggagccagggttggagggaatggggttgcagcgtgaggagacagacctcagcgccagggtccccagacacccagtgcagcccacagtgggcagggtcacaggtattcagaggacctggggttcagtgcaggtccctgggctgtgaggccccttgtctgagggaaaggggccctggttctgtgcatgggacagaaaccccagggacagcaggaccttcgacgctggaaggatagcctcgcttcccaggtgcagctcccggcaggtctggacagttccacagagcacggtactggccctgtcctcagttcccgtccacccttcaaccagtggctcctgggagacttttcctccctgcctcagctccctgcccagccagcctcctgtctccagagaagttctccattaaaaaataatttagcaaatcactatactctcaaattacttctagatggactattacatgtgacagatgatgtatgaatgtatttgttagtcagcactgcaggatattaaaaagaagattactg

SEQ ID NO: 9 - DNA, 36152 bp, Homo sapiens
  source 1..36152: mol_type = other DNA
gtacctccagcgcgcgggttaaccttggccgtgggcagggcggggtctttcgccgtgtggtgcctggagcccggacccaccccttcccgaccgcgcctctccgacgctcccgggacgcaccctccccgcggcttgcaaggtggacccctgggggacacctggcgcggccacctggggccacctttcccgcctccgctccctcgggaggacgtccattcctctttgtttgggactgcctcagccgcagtcagcgaggctggtcacagacgcggcccaaaatgaatgcaaatagtttggataagaaaatcatttcacgttcaatcccaatgcagaactacagacctgtcattaaaagtgccgcagctgtggactcagaacaattgtgtttgctcctcgcgcccattattagcattccaatcgtttaacatccacccgagatgaaacctctttggtggtgttgcttgtttccgtccatgctctctgacttccttttttattttcctcctccccataaaacaaacattctgcctcttgccggtgcaaattgacttggcccaaaatggagaaaatgatcgcttggacacggctttgggcagcctgagctgctgttttggattgcttcctagccctctaaccacaccccactgcaacagaccagtagcaagatggtgagggaattaaattctttgcacggatgcgctggttttcggaaacaatgccgccaccatccccgtttccaaatctgcccagaactgtaaatccaaatgaagattcaacagaataaagaaaatgtgtgcttcttgctagctatcaacaaaactactttgtaacatgtcagcatttaagctttctacagttcccttttgcacattgccactcgtctgtgtggatggagctttgtgttgctcagtccgtagagttagggagcaggcaggcgacagtggttaattacaaagagttaatgtggtgattggtgaccatatttcagcctgtcgttttttgctagtctccaggctgcaatcgatatagctgtcaaatgaagttataccaagaaatgaagacttcacataatgcaggggtgagaggagggaataaatcttcatataagagcaattctcggccgggcgctgtggctcatgcctgtaatcccagcactttgggaggccgaggcgggtggatcacgaggtcaggagatcgagaccatcctggctaacacggtgaaaccccgtctctactaaaaaatacaaaaaattagccgggcgtggtggcgggcgcctgtagtcccagctactcgggaggctgaggcaggagaatggcatgaacccgggaggcgaagcttgcagtgagccgagatcgcaccactgtactctagcctgggcgacagagcaagactccgtctcaaaaaaaaaaaaaaaaaaaaaagaacaattctcaaactttttattctcaggacccctttacctttcaaaaattaccgtggacctaagagcttctgtttgtgtggtatatctgtctatatttaccatattagacattaaagctggaaaaaaattaaagtagttgttaatttacaaaactaataaataggctaggtgcataaatagtgattttaatgaaaaataactattttccaaaccaacccccccgccccccaatcagtgagaagattaacattgtggggttttttcccttttttttaaaattgtggtaagatataacaaaatttaccattttgataatttttaagtgtacaattgagaggtacagccaacaccactgtccatctccagaacttgtcatcatcccaaactgaaaccctgtacctattacacaataactgcccattacttcctcccccaatccctggttaaccattattttttctctatgaatttgagtatttcaggtcccttatataagtggaattagacaatatttgtccttttgcgtctggtttatttagtatagcgtttttaaggtttattcgttttgaagcatgtgtcgggatttcctttttaaaactgaataatatttcattgtatgtatataccacattttgtttatccatttgtcagtggacatttgggttgcttccaccttttggctattgtgaatactactactatgatcattaatgtgcacatgtctgtttgaatccctgcttttaattctttgggatactgtatgtacctagaagtgaaaattgctgagtcataggatagtactatgtttagtttttgaaaccatactgttttcttcagtggctgtaccatttttacattcccattggcagtacctaaggattccaatttctccacatcatcatcagcacttatttcctggttttgataacagttatcctaggagtggcattgtttcttttttttttctttttttttttttttgagacagagtctctctctgtcgcccaggctggaatgcagtggcgctatctcggctcactgcaagcgccgcctcccgggttcacgccattcccctgcctcagcctcccaagtagctgggactacaggcgcccgcaaccacgcccggctaattttttttttttatttttagtagagacggggtttcatcctgttagccaggatggtctcgatctcctgacctcgtgatccgcctgtctcggcctcccaaagtgctgggattacaggcgtgagccactgcgcccggcagaagtggcactgtttcgcatttttgcaaaactaatgtgtgacataatagaaggtaactggattcttatgtctgcctctgcatttaagctgctgcactgtttcattttggtttaagatgaagaaaatcccacctcacagtcatatgaagttggaaagaagaatattttaatagctttttaaagataatcatggatgttctttgatatcacatcaaagtttgacaaatcgtagctttttaaaggttagttacaaagtggaatttgaaactatatcaatgtacttgttttacactgttacattaatatccaatggtgtaccttacactttgaatggatgttgaatccatgcctgttttttaaaacattaagcataagtccttcggaaattttagtggttcactgtgttatacagttcttcctaatgttgacatatttcattatacagtatcaaacaatcactttccttaatgtcttcctatttagtcggaaaagtcttcaagtattgggaagctgtcaagctcacagtggcagataggattttccaaaattctagttttcacttgaaagctagaattttatcattggtaacacaaactgtcagttgttttacttgaagtgacaatctcactttgttacatttttgacagaatttctgccacatacttaagtctgaataaccctggtttgtctgtcagtagtttttttctggtaaaaatggtgttccatgggctgggcacggtggctcacgcctgtaatcccagcactttgggaggccatggcaggtggatcacgaagtcaggagatcgagaccatcctggctaacacggtgaaaccctgtctctactgaaaatacaaaaaattagccgggcgtggtggcgggcgcctgtagtcccaactactcgggaggctgaggcaggagaatggcgtgaacccggaaggtggagtttgcagtgcgccgagattgtgccactgcactccagcctgggcgacagagcgagactccgtctcaaaaaaaaaaaaaaaaaaatggttttccatgaaaaaaatctatttcagctcacagttcaaccaattgcaaaagtgcttttgatttgggcaaccaaatcctcaggacaacccttatactcaggtacacagcagaaatgctttgtgtgtacttggtcacatataactcaaaggtagagatttaataaaaattcatactttttaccatttcattaaggatattctaaaatgaaattgacattatttttagcctgagtgcatggcaatgaaaaatatagctactagtatagtttggtgtcattgcctcaatttgtgctgaagtaccaacagtattatccaccattccttttcgccatcagtgcaaatgttcataaagtaaaaaggataaataatgtcttagtattgttatgaaagatttttaacctcacagattccttgaaagtgtctcaggaacccctccccatacctctacctttaaggtttgtggactacattttgagagctgccgatatgtggtattagattctttgtttatgcatggaagaaaataaatatactaatagccaaaaaattattaccttgttagaagctaccataaatatattaactaatttgttacataagggcatatcttacagttaatcatcatatatggtagtccttaacccagggcttccttgacttaatcacagaatctgctctgtttcaaaatcagtatcttccaaaagagttcatattagacaacatggaggaccccctgtgttctcctgtttttcctgtttcctctgacacttgggagttcattttagtgttatggagtaactaggcttttgcctaactgacttacagtttccattgggttttcttgttggcagagctgctatatccccttcccaaggccagcttccagctaggatcattgattggggtgttcagccaacttcttgggaataagtggactgagaatctggagtttggattatagttgctgttcaattcactttgtgaccttaaaaaaatcactcactcccttggacctctttcaagttatgtacctatgtatgtatgtattttagagacaaggtctcactctgtcatccaggctgaagtgcagtggggcatgatcatggctcactgcggtctcaaactctggtttcaaacaatcctccctgcctcagccttctgagtagctgggactacaggcgctcaccaccatgcccagctaatttgaaaaaattgtttgtagagataggatcttgctatgttgccgaggctagtctagaattcctggccacaaatgatcctcccatctcaacctctgaaagtgctgggattacaggagtgtactatcatgcctggcccaggttccttatattgtaaaatgaaaaggactagactaaataatagctaaggccttaaaaaaaaaacaaaaagcaaaaaacctctatattgccatagcaaaccaggagaattcctcctcctacctcagattgtacagcatgtgacccaagcaaagcctaatgtatattatagaataagagggatgagtgacatggtcaaagaaacaaacgagaaggttgactcaacaatatttagccgaaacaatagctgtaatagcctagcttcctcttgcaattagaaaagacagcttggtttgttttttggtttttgtttttttgagacagtctcgctctgttgcccaggctggaatacagtggcatgatctcggctcactgcaacctctgccttctgggttcaagcaattatcctgcctcaggctcctgagtggctgggattacaggtccccacaaccacgcctggctgattttttgtatttttagtagagctggggtttcactatgtgggcctggctggtcttgaactcctgacctcaagtgatctgcccacctcagcttcctaaagtgctgggattataggcgtgagccactgcacctggcctaaaaaacacagcttggttttttaaaatgatgacagcaatgcgtgttcattattgaaaacttagcaagtaatgacaagcaaaagaaaatattaaatatatatataatccagccacctggaacagccaattcttaacagctttcaaaatttcctctatgaacagactttctttttataaatatgatattgttattcttttataatttttaatattatacaaacatcccctaaaatataaatagctataatatattccttttggggatgtatgcaatttgattaatatacgcctttagaaatgtcaactattcccaacttcctgcaatgagtaatagtgcttggataaacattcctattgtccttttccaaatctttagttattttcttagtataaattcttacaaatggaatttgtacatcaaagggcatgcatacctttcaggtctttggtacttatcatcttattctattctaaaaactttctcccaaattataaccttaccaggtgagtaagtaaatgctggtttcctatactgttaccaacattgagcattttaattttttttatccttaccagtttgataagtggaaatttctcttattataatttgcattttcatacatttttggaaggtttattcagtgagtataattcctaaacaaaaattcaggagttgtggtctggaaaccaaaaagttatttgttgtctgatgtgaaaatttatttatatggaaaatcttagaaagtcagacaaattcaattacagttttcttggtgtttttgtttgtttgtttgagacagagtctcacttggttgcccaggctagagtgcagtggcatgatcatggctcactgcagcctcgacctcccgggctcaaacgatcctcccacttcagcctcccgagtagctgggactacaggtgtttgccaccacacccggctaatctttgtatttcttgtagagacagggcttcgccatgttgcccaagctggtctctaattcctgggctcgagtgatctgcccgcctcaaccttccagagtgctgggattacaggcatgagctactgggcccagcctaaattacagttattaataaacttaacaatatttacaggtctaagtgtaattaaataaaattgagattattcctctaaaaccagtaggcataatctccaaaatgttaagagaacagtattggggaaaaaaatctagtaaagaaagggttttttaagttaaagtatcaagagctaggttgacattatttgtacaaatggatttggttataaaataggttttcttttctttttttttttttttttttttttaggatggagtcttgcactgttgcccgggctggagtgcagtggcacgatcttggatcactgcaacctccgcctcctgggttcaagtgattctcctgcctcagcctccggagtagctgggattacaggcacctgccaccacgcccagctaatattttgtatttttagcagagacggggttttaccatgttggctaggctggtctcgaactcctgatctcatgattcacccgcgtcggcctcccaaagtgctgggattacaggcgtgaaccaccgtgctccgccgaggattgatttctttcttttttgtttgtcctttaaccctggttttggtcagaagcaacctggttctttctcagagttaaacattatcacctctttggttaagacaaagcacaggacttacttgggaagaatcccctgaattaaagatatgaagaaccaaggaaactgatgtgtattgaatacatatgtaaatgccaagctgccgcattgcaaagtgcatgtagcatcatagagtcgactatataaatctagaaacagctcgcctgagtttgaatgctggttttgccactgactagcattgtgatcttaggcaagaatacttaagttctccgtatctgtttcctcctcagtaaattgataattgattggctgatttcttcattcaccaaatatttattgtctattatatgcgaaatagtattcttggtctggggatatagcaatgaacaaagcagataaaaatctttgcattaatggaacttacattccagtgggagagacaactaaggaaaatataaagtaagttagatgggaaaatgtgctgcagagcaaaagtaaaatgggaaaggggaatgctcagtaccgataggaaggaaattgtagagtcaacaggaaaggctaccaagaaagtgatattaatacttgagtaatgatctaagagaaatgagcagttgtgctatgtgaatacctgaggcaggtcattctaagcaggagaaacggcacacaccaaggctctgaaagcagggctatgcctggtgtttttgagaaagtaaagagaccattgtgactagcatggaataaatgtcaggcaagtaagtaggagatgagacagggaaaaattggactcatccttttttttctattttcttctttttttttttttgttttattcgtttgtttttagatggagtctcactctattgctcgggctagagtgcaatggcgcaatctcagctcactgcaacctcctcctcctgggttcaagcaattctcccacctcagcctcctgagtagctgggattacaggcacccgccatcatgcccagctaatttttgtattttttgtagaaacaggggttcaccatgttggccaggctggaactcttgacctcaagtgacccacctgcctctgcctcccaaagtgctgggattacaggcgtgagccaccgtgcctggcctgtactcaccttttaagattgaaacaaatatagaacactttgaacattgcctggttatatccattcctattaccacaaaaatgctgtataacaaactgaatttcagtggagtacaatgatcaatgtttatttttgctgacaaatctagattttggctgggcagtttttctgatcttaactcattcatgctccttcagtcagccatgggttgtgtaggcagctctgctgatctctgctatcctctctcacatgtttggtgatgtaggatggccacagctggggctatttggccctctttcctgtgacgtctcgtcctccaagaagccacctctggcttgttctcatgtcagtggcagggttccatgagagagtggaaggcagttggaactggaacctcattagctctgccacattctactggtcaaagcaagtcacaaggctagcccagattcaagaagtggggaaacagactctatctcttgatgggtagaacagcaaactcacattgttaagagacatagactcatagcaggtagaaaattgaggccatgttagttatcagtctaccacatcggcacataataaaatctcgagaaatattagttactgtttttacttgtgtgaattgcctagttttattttgggatttttaaaattaggattattactttgtaagagcccctcatagatgtttcagttgtttttgatctttgaacttttggggtagattattgttgctttttgcttttttgctttatccctacaaaagtttaaatttttatacagtcagaaatatcagtcttttcctttatgatttctgcctttggtctcattcctagaaagtccttctccaccccaagattatgtattttaaaaatcacctacattttcttttttttttttttttttttttttttcagacagagtctagctctgtcacccaggctggagtatagtggaacaatctcatctctctgtaacctctgcctcccagtctcaagcagtcctcccacgtcagccttccaagtagttgggactacaggtgtgagccaccacacctggctaatttttgtattatttgtagagacaaggtttcaccatgttgcccaggctgatctcaaactcctgggctcaagcaatccttccacctcagcctcccaaagtgctacgattacaggcatgagccaccacacccagcatctacattttcttctagtacttttatgtttcatttttcacacttaaaccctttatctatcatgagggctgacttttttaaaaagacttcttcaaattattgagtgaaacaaaaaggaaatcaacaccgaaactgcaaaactgcaagaagtataaaaggaagtccagcttatgaaatctggatttcccgttcaccatagcttacattagaaagactctgcccagagggatggcccgggccagatgctacagagagagacatgcagggagctagttagtcaggggttcagatctagggagggtgcatttgtgaattcctttttaggaagtgtgtttgaagttaatatgatgaaacttacacttcatatagaggagagtatgaaagaagggaaagtgcatcaaacctgtgcgtttcacagtagaagctccgtcctcacagcttagtaaacaccaatgatcctgtctctaattctctgtctgtaaaaggttcttttgaaccccaggaaaagtagttgacatgagaaaagcgtgcttcttggacagaggtgagggagtaggcaggagagtggtataaagtgataggtggtttgcagacgcgggcacgtcagggaacctttgcagacaggtggccctagctgatgtccctagaccttgctcagttgagttctttgtgcacatctcccactgggctcctctggcccagagatgaggttgtctgctgaaagatgcagtaaagaggctttaaagattttgtggccttgaaccaatcacacaagcaaggctgaaaggactgagcctaaaatggagctgcccctgaatgatctgagtcttcatcaggcagcaccttgcacacagaccatcatctgatgatgggaacaaacttgtgtttgggtgaaacaggcttccccattgcagttactataacacctgtgtggtagtaaggtgcagaattactcaatgcccacttcaagtttaccattgagatgatttcccacccccctcctctaactggcaccattgcccataactaatttcttgctctccccaggtgcctcaagaacctcttgggggcctttatattctgtcatgcttacctagctgatcgggacatggagtgtctgtcttagtaaccaagcctcagtcagctaaaggagctgcatctgattcatatcctaatgtggaccaccaatcttgagccccttggagctctgctagagaaagttgctgctactctcgagaccctcacgttaaaggactgtcagatccaggactcccaactcaggctcctcctgcctgccctgagccactgctcccagctcaccaccttctactttcatggaaacgagacctccatgaatgctctgaaagacctgctgtgtcacacaggcgggctgagcaagttaggcctggaattgtatccttcccatctggagagtcttgacaacaggggtcatgccaattgggagatccttgccccaattcgggctgagctgatgtgtacagtcagggaagtcaggcagcccaagaggatcttttttggtcccgtcccctgcccttcctgtggctcatggccatctgagaaagtggacctccatctttgctcttagggaaggcctgattagtgggatggatacgctttcttctggacccttgggcactaaaatctaggacacaggtgcttttttttttttgatggagtctcgctctgtccctcaggctgaagtgcagtggcacaatctcagctcactgcaacttccacctcccaggttcaagtgattctcctgcctcagcctccctagtagctggtgttactggcatgcaccaccacacccaactaattttgtatttttttttcttttttttttttgagacggagtctcgctctgtcacccaggctggagtgcactggcacgacttcggctcactgcaacctctgcctccagggttcatgccattctcctgcctcagcctccagagtagctgggactacaggtgtccaccaccacacccagctaatttttggtatttttagtagagtcagggtttcaccaagttagccaggatggtctcaatctcctgacctcgtgatccacccgcctcggcctcccaaagtgtaatttttgtatttttagtagagacagggtttcacgatgttggaggaggctggcctcaaactcctgacctcaagtgatctgactaccttggccttccacagtgctgggtttacaggcatgagcagcctggcccggtcaggtgcatcttaaaggaagcacacggtcatgtgtttcaggcacgtgctgactgtgagtggaaaaacaaaggtgactcagctgggggcagaactgggtgaaaatgctgacttggcatcaataaagccttcagggacctgtttcctagactcagaaatggaacctgaagttctagaatgatgcaggagttaccctcgcacggatggttatttaaaaatgtcaaaaataaatggaacctgaatggaaaaaaaaaaaaagaaagactctgcccattctgcccactctgagattgtctatgcttcctgtttggcattcaagaggaagtcctcatatttcccagccatattttgctggtatctttaatatttaatcccacttgtggtcaacaccgaaaggaaaattctatttctgcctcacatctcaggtggagttgtagtgactgaaataatcacaggttgatgaagcctgcttgctacaatgtataaggtccatactgtcagggctacatagatctaactattctaacactgagatttatacatctatacattatttttattctcataggaattctttttaaggtttcgtagctttctcctctgccaagatacaaaatagggaaccacaaattatttatttaaaaaagaaatagatgaatgatattagattccaactaccaattggacagctcctgaggtctcacagtcagccacttttttatcttataagtgatatggtttggctgtgtccccacccaaattgaatcatgaggcagttacccccatgctgttctcatgatactgagttctcacaagatctgatggttttataaggggctttttcctctttgctcagcacttctccttcctgccaccacatgaataaggaggtgtttgcttccccttctgccatgattctaagtttcatgaggtcgccccagccatgctgaactgtgaatcaattaaacctgtttcatttataagttacccagtcttgggcatttcttcatagcagcatgagaatggactaatacaataaatacttattgaacacctattatgttgttgaatctcaatatcaccttttcctaaattgacggaattcccctggcttgcttttttgccattgttctttgcctcagtgtcaccatttacgcaagtccaaagcctaggagccattccttgcttttttctctatttcctttaccttttccaccaacaccaagtcctggatagtcttcacattctttctcctttctttgttcccagtatcaccatcataatccaaatcttcctcatcatgagtcccagcatcaatttttgcttaccactaatatattttccttatgaaaatagagatctttaggaactacaaatgtgacatgtcatacttcagtttgcaatttttctttacttgtcattaaacaatcaaaactctcttgtggtttagaaatccctatacagtctgacccctgtgtagctctcccagcttctcctctcactcagtgaactcaatgcttcagccagagagtttatgtccttatctcctggccttaaattaacataagctgatctcttatttggaacattcttttctttctctcccatttccagagcctaatacttattcatttatcttaagagttatgaaatattatacacaaaaaatgtaatgcatatacgtatatacatgtgactaaaaggatgaaaaatgtgtcaatatataaaatgatatttctagtatgaaaaatatatctatatgtaaaatgatatttctagtaccgttgaagttccttgagtgcccccttcaaccatgtccctttcctcataccagagataaccacagtcttgaattttgtaattgctgtcctcttgcttttctttataaacattacaacaaatgtatatttccctaaacaacatatgatttagttttgcataatgaaactagtttcacatggatatggttcatttttactgttgtaagatatttcattgtgtgactattccaaaaatttactttttattttgtcaatgaatatttgggcttccattttcttgatattacaagcaatattgctatgaatattcttataatgtctcctgatacatatgtgtaagagtatgaatttaagagaacaattactaggttgtaggatgtacattctcaactttaccaaataatgcccaattctttttccaaagtggttatactaatttacttccttctctccatatagtattcatgagtagccattgatccactgtccttagcagctcttgttgttgtcaagccttttgccaatccaatggttgtaatggtattacttggcttttatatatatttgctgtgttactaatgagtttgaacatgttttcgtgtttctttgccatttgtattttgtgcctgtttatgtcttttgcccattttcctgagttatctttttcatattgaatttacactctacagtatttatacattttagatattgttcacttgttttccagtattcaaaaaacatgactagtcatggtggctcacgcctgtaatctcaacactttgggaggctgaggcaagagcattacttaagcccggaagtttgacacctgcctgggctatataggaacaccctgtatctacaaaacattaaaaaaaaaattagctgggcatagtggcattcatctatggtcccagctactcggaaggctaaggtgggaggattgcttgatcctgggaggtcgaagctgcagcgagccatgatcatgctgctgcactccagcctatgcgacaaagggagactctgtccagcctatgcgacagagggagactgtctccaaaaaaatatgtatatttaatctgtgtttaatctgtacaagccactgagctaaactctaagaatacagctgtggataagacagaaactgctcctgccctcatgggtttatcccctcacttaaagggggtcaaaaagtaaactaataaatctctaaactaataaatctctaaatggtaacatcatcttagctttgtactttctgagggtgaagttaccagacccctactaaattctttccccctgaatcctgtattaatacttccatagtacaaacattattattaataatgtttttcttcaccactagttgacaagttttctgaaatcagcagcctatttttttgtttttcatttctgtacctccactacttaacatggtcattacataagggatgcaaaataaatatattcattgaatggatgaatgaaaatatgtcattactaataataactgaaaattcagtgttcactattgatatctagggagtataggtctagatctggcattttgatactgacaattacaggtataactttcagtagaaagtagatatttcaagccctatataaagtagctgggtgcagatttcttaatacaaaaacccggttgcctatgtctacatgttaggtaagccaatttagatttagtcattttataccaaagttatttacagaaaaaaagtagacctagttgtattatcaaaaaattagagttgactgggcacagtggttcactcttgtaatcccggcactttgggaggctggggtgggtggaccactttagctcaggagcccaagaccagctcgggcaacatggcaaagccgtatctctacaaaaattacaaaaattagggcgtggtagcatgtgcctgtagtcccagctacttgggaagctgaggtaggaggatcgcttgcacctcgggaggcggaggttgcagtgagccaagattgcaccatggcactccagcctgggtgacagagctagaccttgtctcacaaaagaaaaaaaaaaaaaagccaaggcaatacaacctagtaagagtgataaggcacatactaataaataattagaatacaaggcagaaggtgataagtaccacagagtggagagattgatatggaagatcagggaaaagatattacttccaggataaaaaggagggggaaaggccaggtgtggtgcctcatgccataatcccagcactcctaggaggatgaggcaggaggattgcaggagcccaggagttcaagactagcctgagtaatatagtgagacctcgtttctacaaaaaatgtaaaaagccagatgtagtggcacacttcagtggtctcaggaggctgaggtgagaggatagcttgagcccaggaggcaaaggttgcagtgagccgtgattgcgccactgcactctagcctgggcgacagagcaagatcctgtttccaaaaaaataaaataaaacaaagaaaaaagaatacaatatattgttaactataatcatcatgtagtacaatagatcttttgaacttattcttcctatctaagtgaaattttgtatcctttgaccagcatctctccaactccctcctttcaccagcagtcacctcagctgctagtaactacctttctacattttttcttttttaagacagagacttgctctgttgcccaggcaggagtgcagtgatgtgatctcagctcactgcaacctctgcctcccaagttcaagtgattctcctgccccagcctcctgagtagctgggatcacaggtgcgtgccacctatgatatatatgtgtgtatatatattttttatatatgtttatatatatgtatatataaatatatatattatatatttatatatattttataatatatatttatatatataaatatataatatatatataaaaaatatatataaattagcctggctaaattttgtatttttagtagagatggggtttcaccatgttcgccaggctggtttcgaacttctgacctcagatgatctgaccacctatgcctcccaaagtgctgggattacagacatgagccaccatgcctggccaattctactttctatagtacttctatgagatcaacttttttacattccacatatgagtgagatcatgcagtatgtgtctttctgttgctggcttatttcagttaacactttccaccaggttcatccatgttgtcacaaatgacagaatttccttttttatggctgaataatatttcattgtgtatgtataccacattttctatatccatttgtcagctgatggacacaagttgattctatgtcttgtctattgtgaataatatatagcaaacatgagagtgtggatatctcttccatattgatttcattttttaaagatatattcccagtagtgggattgttggattgtatagtagttctatgtttaatattttgagaaacctccatactgttttccataatggctgtatgaattcatattcctactaacagtgtgtgcgggttcccttttctccaccaaagacttgctatctttggtcttttccataatagctattttaacaggtgtgagatgatgtttcattgtggttttaatttgcatttccctaatgttgatgttgagcatttttttcatatacctgtttgccatttatatgttgcttttgagaaatgtctgtttgagtcctttgcccattttttattggggttgttttcttgctattgaatttattgagttacttgtatattttggatattaatcccttatgagatgtatattttgcaaatatttcctcccattctataggttgtctcttcattctgtttattgtttcctttgctgtgcttattagtttgatgtaatcccatttgtccacttttgcttttgttgactctgcttgtggggtcatatccaaaaaatcattgcccacactagtgttatggagcttttcccatatattttctgtcttagttcattttctgttgccataattgaatgcctgaggctaggtaatttataaagaaaagaaatttattatttacggttctggaagctgggaagtgcaaggtcgagggtcttctgcatctggtgagggccttctcagtgtgtcataacatggtggaggacataacgcggtgagtgaggcacactgagaacaaaactggctcctatgacagatctactcttctgataactaacccactcctgttcttccccattaattcacccactaattcatgaatggattaatccacttatgaaggcaaagccctcatgacccaatcatctcttaacagcttcacctcttaatactgttaaactgaggattcagtttcaaaatgagtttcaaagggaacaagcattcaaaccataaccattttctgctagtagtttcacagtttaggatcttacatttatgtctttaatccattttcagttgatttttgtatatgggatgagatgagggtctaatttcattcgactgcatgtgaatctccagttttcccaacaccgttccctgaagagactgtcttttcgtgtgttcctggcatcttcgtccaaaatcggttggccataaatgtgtggatttatttctgggctttctaggctgttccatcagctatgtgtctgttttatgccagtaccatgctgtttggttactatagctttgttatatatatatattttatatatacgtatattatatatatataatatatacgtaattcttttttttttttttttttcttgagatggagtctcgctctgttgcctaggctggtgtgcagtggcgtgatcttggctcactgcagcctctgcctccctggttcaagcgattctcctgcttcagccacctgagtaagtaactgggattacaggtgtacaccagcacacccagctaattttgtatttttagtacagggtttcaccagttggccaggttggtctcaaactcctgacctcaagtgatcagcctgccttggccttccaaagtgctgggattacaggtgtgagccaccatgcctggcctttgtaataagttttgaagtgaggtagtatgatacctccagctttattctttttactcaaaattgctttggttatttggaaccttttgtggtttcatacaagttttgagattgtttttctatttctgtgaagaatgtcattggtattttgatagggattgcattcaatctgtagatcactttgtgaaatttttttttcaaaaacataatcataataccattgtcacacgtaaaaataattaacacttatttttgactgaaccagtcttaacaagaagcatactagctattagccaggcctcagatgagaggatctaggcatcatcattcacacaacaaaatatttatgtgtaaatgacacacactaacaagcctaagtattaaataatgtactgaaagaggagagtctctctcctgagtaatttactaaggacttcaattgtgaaaagtatgccccaaacaccaattaagtgtgccaaaagcaatttattcatgtttctagagaaaaataaaaggggaatatctgagttgtggttttccatgtatgtggatagtcgcattagtaatgaatcaaggaacactttatttcatttgtgaagcagcacttgattttatatgctctgtggtctcagttggctttacataagccagggataggatttaagaaaagaaatctcttcaagttcatgtataatcaatttatttagaacctataatcattaagttagctgtgtcatatacaaaattagaagaaaattaaccaattatcttttgttacttattttttagaacctgagatttttgttcaactttgtaatgtgaaccttttctgaaagctctatttgtcagtggcagaaatattacaaatatttctagcatcatacagtttttcatatgcccttaagtagtttctaacattttaacatttttattcatatctcttaaaaaagaaaattttgaagagttccttttcatttatttacaatgaaatttggaaacaaaaacttattacattacaaaatctaaaataaagttaccttttttaaaaaaatggatcataaacattttgtaaaaagagttgaaaataatcattgttcttaagtcttactgctagaggaagttgtacacattaaggatgtatgtggcactgtttccaaaataaatgtatatttatgctacataagaccaagattagaccattgaagttgtaatgatcattctagttctcaaattcaaatgcaatttttttcaatacaaaaaagagactgtacaatgaaggaaaactcataatgcttttgactttaccagatgctagaggctactcaaaataaaggccagaatgtctccatatttagcgtagttcttctctatactcaacatacttgtagctgagttcatggtgtacatttttcgtgaatggttgtttataggatgtttatatattatcttggcaagataactttgaaagcccactgttttcctagcatttttctatggttgctaaacaatttctgcccaatctaaaaaattactttcctataccagcaggtggaggcaagagcagtcgaattgtagcactttgcttttcaagtgtactggcatgtattgtagattatctatccatgactcaaagtctctttatgacgtgtctctcacataattacttttcttcaacaactctgttgttgttttagcatcttcttttgattgctttattatttgctttatttacttggtgtctgggactgaacttagtggtcattttaggacagactaatttagattttcatcactttcctatactcattgattgaacagttaaaacatatatgttatatgctgaacacattcttccacatttgccaagaaatacaaaaatgactaagacatggaccacattcccaaagagcttacattctagtagaattacaaggaaaaatgtcttcaattcctctcctgacttggggaagcagatcagtcagccttgctggtatagctatggctagcattgggtagtaataaagctcagtattcacgtggattttaattccatcaacaaatatttactaagcaccagggactacattggggattaatttataaacataggctttttgtcttacagataaaaaaggccaaaacaatcttcaaaagaagtatcatttatttttaaacttcttaatacagattatatagaacaaatagttaaccgacatatagatcctgatgcattgcatttaaggaactttcagttagaagtaactgtgtgtaacattttctagaatatacttagaaaactttccacaaatcctggttgaaataaaataaaagtatgttactctacatcaattccattagctgtttatttgtagccaataatgataaaaaatatatacaaacagtatgaaagaggagaactgagttctaaggttatgtctgtatgtgcagaatgagagatggagaagaaactcatagttatggaaaacagaaaagaatggccccagaatttcttgcaagacttagcagccaccaatattcagaactgtctttaagccccaacctgtccatcatcttaatacattgtgcatcagaaatttccaacccaattaaaccatttttgtttccttcattggtttatttatgaaagtcactaaaaagacacaaatctggtctaacctattttagccttacctcttatccctccacatcccattaaacccgtgtacccaccttacctcatagagctatcttgaaagactcagccagtttagaagttacatcctcattgaagtctttcctagattccccaaggcagagtcacacacactgtcctcttcattctccattgccttatttatatagaatttgttacctgatattctgttatttcattattatttttagagacagggtcttactctgttacccaggctggagtgcagtgacacaattgtggctcactgtagcctgacctcctgggatcaagtgagcgtcccaagtagctgggactatagatgaggtctcaccacgttgcctaggctggtcttgaacttctgggctcaagtgatcctttctctttggcttcccaaattgctgggattacaggcgtgagccaccacacccggcctgctacctgatactctaatgtctctttccgtatttcttcctcacaagtctgtactctcctgaaaggtaataactttgtcttattcatctttgtaacctcagtaaatatttgctgaaggaataactgaatcaactatttcttgagaagtccttttataataagcttctctctccccttttttttttttttttgctgatgtctgaattatagtcataattccagatgatagatgatagtaacaagtcaataaatcctatcaatagggaataaagaaccagcatttattgcatagagtgttttcttaggatacctcagctgaggctgggcacagtggctcatgcctgtaatcccagcactttgggaggccgaggcgggtggatcacctgaggtcaggcgttcaagaccagcctggccaacatggtgaaaccttgtctcgactaaaaatacaaaaatttgtattccagctactcaaggggccaaggtgggagaatcacttgaacctgggaggtggaggttacagtgagccaaaatcatgccattgcactccagtctgggtgagagagcaagacttcgtttcaaaaaaaagagaaaagaaaagaatgcctcagctgaaccttatcaataaaagatgtagattatttgtttgagtactttaaggaagaatttgccatttcctgggagtacactgtttccaagtgatttattgattacctatgaacagttcattaaagggctctggaaaaaaatgagacctgggtgcagagggcagccatccaggtcttccatgtttgagtggttttactctttgagaacaggtgactaaaaagctgcccaagtctatgtgacctgtttttcagagctggatgaaagctaaagtggggcacttctccacagcccctgcagcaatctctcagggagtggtatagataacaagtcagacatgtgatgtaagcatgtatgctttaagtcaccttattctctccccattaaaagcaaagtacaaaatcagagaagtgcaattggtgagaaatttgatgatttccttttctgggatgggagttgcagcatcagtataggataataaagaataagggccctcagatacttttcagtttataaataaaaatacaaaagaatatgggctctggagtcaggcttgggtttgaatcccagctgcacaaatgctatgtgaccttgagcaagctacttctctgtagccagtaaattgggttgataatatcttcctcttggcttattgggaggattaaataagaacatgcatataaactcttggtgtagtgtcttgcaaaggcctgaggagagcttaacagtttgagggagatgtgaaagtagttcattatgtctggagcatagatatgagagcaaaaggatggcactgagaaagccagcatggtagttagggcagattcagaagtagtagcttgaacttgatcctgaagtcactggggaaccatgccattgaaagggagtgtcatgatcagatttatgttttaggatgattactctgcaggcaatctggagaacagattagaaagcatccagaacctcccgggtttctgatttggacaactgagtacatactggtgatcgtccttgagataagaaataaagaaggaggacagttttggttctgggggcaaggaagatgagcaatttaattttagacatactgtattaaggtgaccattgacatccaagtggagctacccaacaggcagttggtcatatgggtctagaactcaggagatttgtgctggaggtacagatctggaagtctttagctataggtgacatgtgtagccatacaaatggaacaggcatggtgtgcaagatgaaaagaaaagaggccatagaactgaatcctgaagagctctaaggaatcctgagaaggggctaaaaacaaaaacaaaacctaaaaaaagacaactgatgataaaaatcatgagggaacagccagagacatcaaatgaaaagaggaatcattatcacaaaagcccaaagagggaaaagttcccaaaaaagagggagttaaaaacaggaaagagtggaaaacactgtcatgtatcacaaaaagtcaagatgtaaatagtgaagaatgtctgttgcatttagtagaaatcactggggaccttggtgagagcagtttccatttttttatgagaccaggacccagattgaagtagggtgaagagtgtttgggacataagaacaaaaagatagtagggctggctggaccactttgaaaagtcttgaggatgaagggaaaggaagaaatagtggtgtctagtgggggacccaggatcaaggaagtttttgtttttttacttaaggtggagaaatgtaaatactccagcacatgtgtgtataaagaggcagtacaaatgagacatttaacattttgctgagccgggcgcggtggctcacgcctgtaatcccagcactttgggaggccgaggcaggcggatcacaaggtcaggagatcgagaccatcctggctaacacagtgaaaccccgtctctactaaaagtacaaaaaattagccgggcgtggtggtgggcacctgtaatcccagctactcgggaggctgaggcaggagaatggcgtgaacccaagaggcggagcttgcagtgagctgagatcgtgccactgcactccagcctgggtgactgagcgagattctgtctcagaaaaaaaaaaaaaaaaagattttgctgagagagatgatgtttcatgggtgatgtctctggaagagattggataggacccaagcacagagcaagaaattggctttaggcaagtcagatttgtcttatactagttaggagtaaagagaaatggatgatacagatgcagctatgttcgtaggagggaagtggagggaatttctgtgtgatggctttagtaatgtaggcagcaaggtcaactactgacagtgagaggagaaattcggggaggctggtcacagtttgaagtaataggtcatgggaggcagatgtttgtgggtggattttcctgaaggcttgggagtccaactcaaatcagaggccatgatataatagtatcaaaacccatagctctgttcagagcctgctatgagaatagagaaggtagctggttaaaatggtcctgagcagaggtttttaagattgatatagcagaaggactggaagttggggttttggtgagagatggttgacctgatagatgaagttcacttctaacagttgtgcaacctgaggtgaaactacaattggaagcccacccctggccccctcctgtaccatgaggggcctcacatgtgtacggatgcccccacctatatgtccaaactctgaccacactccctgctcttaatggccacacctcagtgcaagatatgtacaaaccaatggtgcagttcaccctcaggaaaatggaccctaggaaggggcccacacagattctgggagccatttgagcaagggattctggagtcttgtcacccaaagcacagttgcaggatgttagtggcaagctttgcatgagcacatccccttacctcatctgagctgagtgcagacacaggagggccagagtggagcctgccaaagtacagcagtcagccaggcgcagtggctcacacctgtaatcctagcactttgggaggccaagacgggtggatcacctgaggtcaggagttcaagaccagcctggtcaacatggtgaaaccccgtctctactaaaaatacaaaaattagctgggcgtagtggcacacgcctgtaatcccagctacttgggaggctgaggcaggagaattgcttgaatctgggaggcagaggtttcagtgagccaagatcgtgccactgcactccagcctgggcaacagagcaagagtctgtctcaaaaacaaaaacaaagtacagcagtcatccaggtcgaagggttgagctgtgggagaagtctgttagagtgagaaaatagagggattaaaggactggagttctaagggagatggaaaactaagaatcatgggagtagataaatggaagctgaaaacatagaaggttgtgattacagtggaatagctgactttatcatttctgaggagcatctccaagtggtggtaagaagaataaatacaaaggttcttggagtgaaataggttaaggaagtgatgttggctgggcacagtggctcatgcctgtaatcccagcactttgggaggccaaggtgggagaattgttgagcccaggaatttgagaccagcctgggcaacatagggaaaccccatctctacaggaattaaattagccaggcatgatggtgcatgcctatagtcccagctattagggaaatgggaggatcaagtgcttaagcccaggaagttgaggctgcaatgagttataatcacaccactgtactccagcctgggcaacagaacgagaccctgtcccaaaaagaaaagagagaaaaaagaaactgaagttaagggagtggtaagccttgtccacccatccttagagtctccctgggatgattatggaactttagacagggactgatatggtttggctgtgtccctacccaaatctcatcttgaattatagctcccataatcctcatgtgtcatgggaggaacccaatgggaggtcattgaatctgggggcagatttttcctgtgcttttctcgtgatagtgaataagtctcacgagatctgatggtttcataaagggcagctccctgcacatgctctcttgcctgctgccatgtaagatgtgactttgctcctccttctccttctgctatgattgtgaggcctcccagccatgtggaactgtgagtccgttatacctctttttccttataaattatccagtcttgggtatttcttcatagcagtgtgaaaatagactaatacagggactgtagagctaattctttggtgaatatgagaaaatggcaaagagtttagttgatgacagcaacaaagagagttagtaagggatgtagcaggaagccagtagcctcagaggattagaattgtagtgcagtaatgatttggacagccctttgaggatcaaggagaggtttaccctgtgtcaaggcctcctagtgtgaggagcctgagagaatgtcagtgcacttcatgggagaggcagtgcattcaccaggaatccaggttacagtgaagacaaagtggaaaagccagtgccctgtgacagggttgaggatgtagggtagggggttgagtgtccaagaaagagactggcatgatgggagagcttcaccaactggtgatgctgaacttttggaacagtggcagaatgtatgctgtgaaaggacacagagcagagagaaaacagtaagttcacaaatatttgctgtgttgaaggtctcgtactagaaacctttaggtaaacttttgtgacttctatcttagtaagctcagtcagtgaataagattaattctcacttgtaaaataataaggacatgaaatttaaacagtcttgtggaaaaaccatttttatattctaatcatattatcaatacccttggccctgctccctatggaaagaactgaaagtcttttctgccacactgtgctcttgaaagtagtgcttactccttatttctgcatgttgtgaggattagatgagtgttttaacactcctgcacacatgagctactcggtaaatgagttctcccttcctctgtttctctgtcctttcttccttccagagaagacacctaggaacctagtttgcgagtggaaaggagaaagggtacccaaggaagggcacaggcagggctgcttggcatacatgtgctgtcatgtggaatctcaggaatgggatcatccagtcagtgctgtccgttcgaactttctgcagtggcgaaaacattctctatctgtgctgtctagtgtggtacccacttactacaagtggctattgaatatttgaaatgtgcctggtacaactgagaaactgaattttttattttatttactcataattcatttaaataaccacatgtacctgctgtgttggactgcacaggtctagtggataatgtgctgcttggctgaaggcttcaagaaagaaatggactgagtacctgaggaaatagataagttggcctggcacgatggcccatgcctgtaatctcagcactttgggaggccaaagcgggtggattgcttgagcccaggaattgctcattatgggcaacatagcaagactccatctctactaaaaatttttaaattagctgggtgtgctggcacatgcctgtaatcccagctacttgggaggctgaagcaggaggattgcttgagtccaggaggtctagtttacagtgagctatgactgtaccactgcactccagcctgggcaacagagtgagactttgtctttttaaaaagtaaagagaaagagagagagagaaaaataaagaaaaaaagagaaataaggaaagaagaaagaaaagaaggaaggagaaagaaaaagagaaacaggtaaacctcagtgaggtgtgtagctgggatttggcattgtagaaatcagaaataaaggagtcctatatggtctgatgaaaggaccctggacttgagctatggcctgagaagttgtgaggagaggggtgatttagtcaaaacaatggctagaaagacaactttgtaaatggtagaaatcaggattagagtgtttctgatgtaatagccacacaagagaaataattaaacttatacaggaattccggtcttgtggggagattgatttaatgcagacctcaagagcagcttgtagagaaacattaattgcaaagcaaatactaggaatatttgccaagtgtttcaaagaattgggacaaatttctggaaatatcctgcaaaccatgtagtacaacacagtgacatggtgacagggaaagggatggaaaaaatgtaaattggtaggaggtagaagttgtaaaattttacataatatagtttcactatagccctggctctaataaaacgtgtttccctgtatgaatgtttacttgtgatgatgagggaagatggtgttgctttaatgtttttgtcatatttgtcccatcttgtttcaagtatataatgaacatctgtctgctcatcagtgtgcagtgcattggggtgggggtttgtgatgaaagaaatgtacagtggccattgtgcttgagaagtcctagtttcatttagaatataaaacaaactaattgaataggtgatgacagtaatttaaatgtctaaaatgaatggcacagatgaaaggtgaactggaatggtgaaagccttgatgagaggaagtagaggactttaaactatgcttcaaaagaaaatgaaccccataaatcaacatttctgaaagtacattccataaaatattttacaaaagtctcaaggcaataattaactcagaataactatggcatacttatttgtccaaatgaaattctgtaacctgatgatttctgtcaaaatttatccagctttcttcctttgcctaaacactattattatgatgatgatgatattattttggacacaggagattacaatgctagcaaatgcaccttcctgtcaattcccgtatggtattctgtattatttcttggttagaaatttcacagtgttggcctggtgcagtggcgtatgcttgtcatcccaacactttgggaagctgaagtggaaggatcacttgagcttaggagttcaagaccatcctgggcaacatgggaaaaccacatctctacaaaaagtacaaaaaattagccaggtgtcatgcacacctatagtcccagctacttggaaggttcaggtaagaggatcacctgagctggaaggttgaggctacagtgagccatgatcacgccacctggactgtagcctggctgagagagtgagaccctgtttcaaaaaaaaaaaaattcacaaaggtcatgttttgaaaagtgctttgaaaacagaggagacgatgaagaaggtatgattgagacagaaataataaagagcctggaattttgtagtaggaaaaagaaatctagtgtttaattagacaactggaatctcagatttgatctactttttcattttcaaattattagacgtaataactgctgtaggaaaagacaggctcatgccgtttgtctgcttttgacttatgtagctctcacttgcaaaaagtcagagaaaaatcttcaccaggttctcaagaatacaagtgcagctgctggaatgactacaggtgcactggttttcccacccaggtgcagttctttccagggctgcagaggcacggaaggggaagacgagatcaatgtaccagcatccaaagcattgggtgagcttgaaaatgtaacaaaggggaagaggagggatgctccgcaaaatgaagatgggagaggaaaagcagagataatgcagaaagaaagtactcagtagatcaaaatgttttagttagaagtataaggcattccgctgtcaccattccttttctttggtaacaagaactgtgaatcctgaaaagaattaaggtaaaatctcagaaggtgagaaaaaaagtattaagataaaaattttaatgtatttagttgacccatgacatcatgatttctagcttttgtttctgtctttttagcccttccaggttcagggaatagtattacattaagggagaaatagcttttcactagttgccttggaaactataaaacatatatgtgtccggccgaggtggaggtattgacatccttatcagtttaactttcccactacaaataaatgacaagtgtctgaggtgatagttatgctaattaacctggtttgataattacacaatgtatacatgtattgaaacatcgcactgtatcctataaagatgtgcaattattgtgtcaattaaaaacaaaataagacttaacaaacaatcagatatgctgtgaccactcagccttccagtaaatgttaggaaatagatgaaaaccaacgaaggtcatcttatcagtgaaatgcttgaagtaattttcttttaaagctgaataataggctgggcacggtggctcatgcctgtaatctcaacacattggaaggccaaggtgggcggatcacttccggttagtagtttgagaccagcctggccaacatggtgaaaccccatctctaataaaaatacagaaaactagtcaggcatggtggcacaagcttgtaatcccagctcctcggaaggctgaggcacgagaatcgctttaacctgggaggcggaggttgcagtgagctgagattgtgccactatactccaacctaggggatagagtgagactctatctccaaaaaaaaaaaaaaacctgaatattaatgatactaatggaaatttgtctatagtcattggtttatactaagaggagtggtgaaaagaacagggtgttaagatggatatgtcctatgttttagtcgttgttcttctctttcatattcatgtaactcagtcatctcagggccagcctttttacctatactgggacttccttgaagtacagcccgtcatggccatgactgactctttcttagtggcctctgttggcagaaataattattttggaaattttcagccaactgtataaatcctgaactgaacatctttattattttgcaccaacaccaagtatgtgagaccctctactcatctgccatttcttgtactctgacctccatactgttggtttctccctatacttattcctttatcagttttcattcctttatcagtaggatcctatatgaggcaaataatataaaaccccattctaactgatttcatcatagaggggacttactgactcataactggaatggtcaggctttacaattagttgatctatgggctctatggtgtctttaaatatttggtttccttcctttattctgccattcaaagtgtctgttttatcgtaaatcagattctgctcattctcataggatggctgccagctgcaatcaaggacataagtgtactcacacttagtgggaatgagacccccttctctcacagcattccaagcaagagtactgagggtagggacagctaccttcaaagaacgtgaactatgttgggggtgtatgagtgttgagaggaagatgtgcatataattagataggggaagaggttaatggctagacaaccatgtatatctaaccatctactgcactgacttctccattgttatttctggaacccttgtcctatggtaaataaactcctccactttttcatactattccctgaatcttcccttctcttcctgaccttttctaaaatccactgaaccctgacaaaaatgtttcccatgcatccctcttcctcccacaccccataccacaaagtaaggaggaaagatcagtatcttcttttcccccagaggccccctccaaccactgtgatgtcctgcacttcttcaccattgtgtaaaaacacctttgaggctcatcatctggttttcccattttatatcctgctcatgttgtctctcccagtcagctgagagttccttcttcagatactcgggttcctggttcagtcttcctttctactcccgggatccaccatcaacctgctgactccagtgttcatgtaggcaatttatccaaactagactcttgtttcttcacactcttgcaaagaaactgcttaacccttgaagtcttaaattcagatatctcacatttttactataacctgactactcccattttactgttttattgattttactaagactgtagtttttctgtctaaaacattgctcatgttttatattccatttcttcctatctctgtagggagctcagtctctctaaatatcttaataatgtaattgaaaaaaagtggtttcaagtagaatcataactatgataaatttcttacatattttgtggaaatttaaaacatatttatacccaaaacttttgatctaaaaccaaggccttttgctaactgtaaatgatttgattggcatttctcactatccttcttgtataaactacacctataatgcatcatctttgatttccagtttcagcttctcgaaagtggaacatgcgtataaggaaacatataagtagtatgaattcagaagccttctgaattgtcacaattcctttcccaatctttcataaggacaagttttttgtgggagttgatttttctgtaactctctttttaaaagtatttctgaaaccttttacctatcccagaaataagtttttaaatgttgtatacatttaatcagtcaaatatttaaattacatgaaaataagcataacaggcataaacaggttttggaacaacaggcttaaccattagttagcatataactcaactggtggaagaagaaatgtgaaaatgtattagaaaatagcctggcagcctggagttgtaagcatcaactagtatgtggacatgagttcttgtggagagtaagttgaagaggtcagtatttaggtctctcctgtgtgaaaaatgtatctattctgtgcctcagcctcttttagctacactgcgttagctctccttatttccacggccagatccacagagaattgcctaggttcacactctctccagttcttcacctcttccttattcctccatcatagtagtctgacctgtacccctgctgctcccctgacactggttttgccagagtcatgaatggcattctgctgctgtattcaacaaagacttttcagtatttctcaacatctgtacgtttgctgttgttttcactgcttgcttgtcacaaggtcctagaacccatattggcctaatattccttctccctcagtgatcatattagagttagggccccaatgcttttctcttctcactctgcaaactcccttgagtactcctataagtaaaattaccacttaatattaattcctcttacatgttctgtagccacttcaaacttggcatgtccaaaatcaagtttctcttttttcccccaaaaagcctcctttcccttgactctcttgactctctcacctccaccgcctccatccattcagtaccaaatccttttgagtcaaactcctgaatatattttaaatcattccgattcctcctatttcctagttttatatactttaatcatgagccccaatagctctaagaacaacttctctcttgaatgatctcttttacaaacctttcaactcattataatttgagtgatttctctaaaacacaaatctgttatctgtcacctgattaaaacctttctatggctctcgaattgccttcagaataagattggatgtttgggggagttttttgttgttgtcgttgttgttttaatgtttcgtagagacaatgtttcactattttgcccaggctggtctcgaaccctggaccttaagcaatctgcctgcctcaccctctcaaaatgttgggattataggcatgagccacggtgcctggccaaggttggatgttctgatgattcccaaggctcttcatttgctaaatgaccttacttaccttttcagccttctctccccttatggcattacctttggataattcctacacattgttcaaatgttggtttgctagttgctctttctagaaaatctttcttgacacattccccctgccccaagaccagaatggggttcccttcgtttggagttctctttgcttacacttgtcataacactcatctcagtgtagtataattgcatatttatccatttgtcctttctactgtattagaatgtcagggtctaagacaatttgccatttatccacattgcctgtcacgtaactagatacagtacatgctcataaatattagctgggtgaatgactttaaacaagtcacttagtctttctgaggcttcaattgctttattagaagagaatacagtaatgccctacctaccttataaggttgttttgggatcctgtaagataatagaaatgaagcttagcatagtggttaagagtatgggttctggatccatactgcctagcttttaatcctacctgtgaccctacaactagctgcgtggctttaggcaagttacttaacttctctgtgttttagttttctcttcagtaaaatgagactaaccacagtatataacttagagggttgttggaggactgagtgagttactacatgggaagtattttgaaccatgcctgaacagacaataaatgttagctactaaatataacatttttatttgtaagccctaaaattatatgtacttatatatatgtatatgtatgcatatgtatatagacagagagagaaacatggcatcagtattactagtttgaatgttttaagggagtaaagactggtatcattattctaaacaatttcttttttctttttttcttttaggataatggcatagctatcccagagtttattttccaagtcttaaattcaaattgtcattcttaatttacatgaaattttggttaaaaaaaattggtgttcagtataagaagagaagtttttaaatgtttcctcgctaaacttgcaaggttttttcgagtctatgtacatagtaggtgaaagttagcattggaaaaatattaaaataaaaaagatactggccgggtgcagtggctcacacctgtaatcccagtactttgtgaggccaaggcaggaggattgcttgagctcaggagttcaagaccagcctgggcaatatggggagacctcatctctacaaataatttttaaaaattagctcggcatggtggtatgtcccctgtagtttcagctacttgggaggttggggtgggagaaacacttgagtccatgaggtcaaggctgcaatgagctatgatcacatcactgcactccagcgtgggcaacagaatgagaccctgtcttaaaaaaagagggagggaagattactgatttaatttataaaggagaattattatagctccaacacctgactttatttatctatatgatttaattacacaaacaattcagtgtttgaattatacaaatttcattaaaactatgtaattatgcaagaaaaataggaaatacaggggcacttagttttgtgcatatgtgttcacctgagagtatttgcttgtttttttaaaaaggttctttttaatttaatatttaattttataatgcacattcatatgttgactttggaccaacagaaatccctaattcttattctttttctgattctttttag

SEQ ID NO: 10 - DNA, 4133 bp, Homo sapiens
  source 1..4133: mol_type = other DNA
gtgggtcagatgcagaagcatatcagtgtttcactttgtggacatcttaaatcatttcatgctttctgtctttcagttttccagttttacaagcattgatttttacattataattaattgcttagaattatctaagattttaaaattgtttatgttgacaaaggtgctataaaatgtacactctgattacactgctctctggagagcattttgacaatgtgtcagaacttttaagacattcatacccttgctcattaattccacacctagacatttattctaagaaaataatcatatatatggaaaattcatgtatcaatttatgtataaataggtattcttgttatatcataggcttagaaacaattcccaaatgtcaactaatagattagataaataaattatgaaacatccatcctctgtaatgctgtataaccattaaaatcatggattacaagcagtatttaatgacatggggaaaaggacacagaagaactggaagaaaataaattttatcaatggttttgttaggattctctagagaaattgaacctatagggtgtgtgtgtgtgtctgtgtgtgtgtgtgtgtaagtatatatatatatataaacatatgtatgtgtggggagagagagattgattgatagattgattatagggaattggcttacatgactaaggagtctggaaagtccagaatctcagtgggggctggtaggcttgagacccaagagagctgatgttccagctccagtccgaaggccagtagcctagaggcccagaagaaccagtagtgcagaagtctggagactgcaggaggattctcccttgttcagggagtcttttaggccctaaactgtttggattttggctaccacattatagagggcagtctgctttacttcaggctcatcactctaacgttaatatcatcaaaaacaccctccaagttaacacataagattaatcatcagaatgtttaatatatcaggtgatgggtttatagctaatttttactttcctctttatgtatttctctattttctgtattttctgcccttacatacattatttttataacatattagacccttcaagttataaggagtgaagattccctttggttacctctaagggttggacatactttgtagaataattatgacagacaactttggctgtgtatccaggcttcatacaagaatataagatagctgcagaactggatattgtaaacattcgtgggcattttggaatttgaaagatcatcagaatccagcatagccctagtgacctggtcatctccttgcccccactatcccttcatcaccaagagttctctactctatgtttcactgtaaaaaggacttggctattttctcttatctcagtgtttgttggctattttctcttatctcagcatttgtttcagtttctgctcctactaccaactgcttcactttcattaatggcttctcaatcttattacacgtcttgaatttaaactcgtgaataaaaagatctggttgtcttcattagtcaaagtcaaagggatagagttagtccctattcagtagagcttttctagctggcaacttcatgtgcgtgtaccatcctggatgtggtttgtccttggttcaggtgctcacttcttcagtcacttgtggccaagatggtataccaacccataacttaggcatttgagacaaagtctcactctgtcacccaggctggagtgctatggcacaatcctagctcactgcagcctcgaactcttgggttcaagagatccttctgcctcagcttcctgagtagctgggactgcaggcatgtgccaccatgcccagctaatttttacattttgtgtggagatgggatctcactatgttgcccaggctggtctcatgtatgttgcccactccttgtctcaagtgaaccttctgtcttggcctcccaaagcactgggcttacagatgtgagccaccatggctggctcaaacaaaatctttataaaataattactttaaattgtttttctctcaatagtagatcttttcagcatactttcaagtttgtgatgtttgttcttgctcctctataaatttatttttgtgggttaattatcaaaatttttgagtttaggaatagatttcttaaaaactaactttctcttatctgggcatattctctgagtccattatgcctctcacagtagctgttgaaaccttgtttgtctagtgtcaggcactgggcgtcagcattgtctatggtttggcagtgagagcataaatctggttccaggtctttgtggcaaagtaaggaaggaaatggctttcagcacctttgtttgtttaagaatgtttctaattttaggctcctgcatttgatgttgcttatataagtttatgagcaatttttattccttcttaatatatttcatagctaatttattttatttttttattattattattattttttgagatggagtttcactcttgttgcccaggttggagtgcagtcatgtaatcttggctcactgcaacctccgcctcccgggttcaatcaattctcctgcctcagcctcctgagtggctgggattacaggcatgcaccaccgtgctcagctaattttgtacttttagtagagacaggatttcaccatgttggccaggctggtctcaaactcctgacctcagatgatccacctgcctcagcctcccagaatgctgggattatgagcttgagccaccgttttatagctaatttttaaaagtaaacatattgcaaccatatagttaactagtatcacttaaataagtgctgtattaaatttcaaaattttctattccattctttccttaaccgacagacataaaattattattaaatcctaaaagcataatttcataatttgatatttcaaaaatataccttatggatttattctgatatttgtggcaggtatttctaatagctttatttgtaacaatgttttaggaggactgatacgagtgtttaactgtataatttcttgctgtataaaggatagctctactgtctactatatatcatatggaaattttactgtttataataccttcacaatactgaagttaatcaaataaaaatttacttattttcacagcataacacaaccatcactataaaccatacttatttttgttctatagtattggttatttcactgacatcagagatttttacccaattaaagttaaaatacaaattgatgaaaaacccaggaaccacctttaatatgtgaagattaaaccaaactaaattatcattattatttaatggactgtctccaatgtctggctacttgttggatgtgtccacttagatttctggggatcctttgaagttatctggaattttgaatgtttttatgtatgtgtgcatttggggtagggtccgttgctttgattagattttctatggagtctttatctttttatgtacccttttcccatcccagatcctaagaagcctcagtataggaactgtgtctttctcttcctgcattgccagttgataaattacaccctcaggctagatgcagtgattcatgcctgtaatcctaatactttaggaggctgaggtgggaggatgactttagcccaggagtttgagaccagcctgggaaatatggcaaaactgcagctctacaaaaaaatataaaaattagctgagtgtggtggtgcatgcctgtggtcccagatactcagtggtgttggggaagaggggtgctgaggcaggaggattgcttgagcctgggaggttgaggctgtagtgagctgtgattgcaccactgcactccagcctgggcgacaaagcaagaccctgtctcaaaaaaaaaaaaaattgtaccccagtatactttgataagtgctcagctcacatctttaccgttcataatgatgccagctggaacagccaaatcctatattagatgctttttcttggtagccttaggaggctttacagaaagtataaaataaaacaaacttttattggcatgatcattcatctgggtatgaggtatttggcttaatactgatttgacaagtcctgttgtgtggtgatagtttttttctccatctgcag

SEQ ID NO: 11 - DNA, 14318 bp, Homo sapiens
  source 1..14318: mol_type = other DNA
gtaagtggtgttataaatccctttaaagagggaaaaactctacaacaaaaaagaacattcagtcataaataaaacatactgactggattttcttagcttttgtttcgaatgattataaaaccataatgggcattatatagtattacataatgttaattatatcgttgaggttatgttgagctgctaattccattcacttaaagaccaaatgtagaagagtgaacatctgtaaagttaaggctttttaataacattatgaacttgatggttacatgtaagggttatcttagaccaaatcaattagaagcaaatggaatcaagttgtttatctgtaaatatctcgtggttttggaaccataatattgatgacatactgttgatgctgtatgccggagtcattcctgtctgtcatccttacatttttcaagacttggggaaattatggataataaatgttctaggtgggtctgtccaggtgtttttgatctttttaccaatgttgatttgcctcctagcagctttcaatttttattttcatgacacttcagcaatttttttggggaaaaaaaacagtttcaaaattccaggctttttttttgtttaattttgcatgtttctttctgcagaatcctaattactttttcctttttagcagaccgtgacaagagttggaatatttaatattttaaattaaatagcattttaatttgtaactcattatacaatgtgtcatcaagatttagacatgtaaaatgtatatcctattttctcatatcagacaagcatttttcatcctataattgataatcatataattcataataattcacatttggtctataaacttcatggtgaaagtaagttatgaaaataactttatgattattcttcattagctaaattgttcttcttgctccttttgaccacagttatttgatgtgatttgaatcatggtctttatagtctcctcattttatttcatccccaaattacatttctttgttgttctattttttttatgtaatttggaatttttcctagaatttccagtttcctttgattaatcctattttcatcatgatttctaagttcttatttggaataatgtttttgtttttatttcacattctgtgattcttatgaatgttatcaagatatgaaaggtttgtcactttacatttctttgtcatagagtacttttaaattttgtgtatttgagaccagcctggccaacatggtgaaactccatttctactaaaaatacaaaaattagccaggcatggtggcaagcacctgtattcccagctactcaggaggctgaggcaggagaatcacttgaacccaggaggcagaggttgcagtgagctgagatcatgccactgcactccagcctgggcaacagagtgaggctccttctcaaaaattaaaataaaataaattttctatagttttgggattgatcccactaaacttgggaacaaattgctgactctagagtagactggcacactatagtgacctgatagacaccaatgcgttcatcagatttgtgtctttatttgagctggttcatttcgggcctttattttaacaatttaaggtaatttcagatttggttctgtaattctggtttctataatttttattgtgtgaacattttttaggggcttctacaacatttgctaactctacatcaggataataaaaaataactattgtgtttgtttttgcattgaaggtcattaggtgaatttacctacctttaaacatcttccatgacaaatggttatgtttatttaggcaatttttttaaaaacctagaattaccagtattagttctctgctggagttggacactttaataaatggtaaaacttatcccattcgtacctaaagggcaaaatcagatatccaaatattttatttattttctctgtgatactgtaagttaaataggatagccatgatatagcatataaagccttcattaatggctgggcatggtggctcacgcctgtaatcccagcactttgtgaggctgaggcaggcagatcacttgagctcgggagttcaagaccagcttgggcaatatggcaaaaacccatctctacaaaaataaaaaatagtggccaggtgcggtggctcacgcctgtaatcccagcactttgggaggccaaggcgggtggatcacgggaggtcagaagttcaagaccagcctggtcaacatggtgaaaccctgtctctactaaatatacaaaaattagccaggtgtggtggcaggcgcctgtaatcccagctactcaggaggctgaggcatgagaattgcttgaacccgggaggtggaggttgcagtgagtctagactgtgccattgggctccagcctgggcaacaagagcaaaacttcatctcaaaaaaataaaaaataaattaattaattaaaaatagaaaaattagctgagcatggtggtaagtgcctgtagtcccagctactcgggaggctgaggtgggaggattgcttgtgcccaggaggttgagactgcactgagcagtggttgtgccactgtactccagcctgagtcacagagtgagaccatgtctcagaaagaaaaaaaaaaaaatccacacataaaggcctcattaagctggataaataggatcttaaatttatatgatgtcagcaatttcaggcctgctctactaaaattaggatgctctgaataatattcccaagacaccaataatatatgtaataatcaaatatattatcccaattggatataaaatgttattttagctctttttattttccacttaaaattaatacatagaaaagtgaaattacttttcataattcttcatgcaatatgggctccagttatctattgatgcataacatattaccccaaaccttagtggcctgaaatagcaaccgtcattttcttttctctcacagtttctatggatcaagaattcagaaaggaattagttggacagttctgacttggggtctgacatgtggtttcaggcagtggtggcttgggttgaagcaggtaggaactaatcaggcatctgtctttattcatgtagtctcaaggtgtctgtatttgtccattttcacactgctataaagagtacctgagactgggtaatttataaagaaagaggtttaattgactcacagttccacatggctgggaggccttaggaacttacagtcatggcataaggtaaaggggaagcaaggcatgtcttacatgatgtcaggagagagagcacaggggaagcaccagacacttatcaaacaatcagatcttgtaagaactcactcaccatcacgagaacagcatgggggaaaccaccccatgatccattcacttcccaccagctccctcccttgacatgcggaaattacaatttggattacaatttgacatgagatttgggtagggacacagccaaactttcatcacacccccagcccctcacaaatctcatgtccttttcacatttcaaaaccaatcatgcctccccaacagtcccccatagtcttaattcattccagcattaactcaaaagtccaagtccaaagtttcctctgagacaaggcaagtctcttctgcctatgagtctgtaaaatcaaagacaagttagttacttctaagacacagtgtgggtacaggcgttgggtaaatgttcacattccaaatgggagaaattggccaaaacaaaggggccacaggccctatgcaagtccaaaacctggccaggcagtcattaaatcttaaaactccaaaatctcctttgactccatgtctcacatccagggcgcactgatccaaggggtgggcccccatggccttgggtggctctgcctctgtggttctcaggttacaacccctgtagctgctttcacaggctgatgttgcctgcagctttttcaggtgcagggtgcaagctgtcatgtggatctaccattctggagtctggagggcagtagcccccttctcacaactccactaggcagtgccctagtggggactctgtttgggggctcctgtgccacatttcccttccccactgccctaacagaggttctctgtgaggtctctgcccccgcagcagacttctgcctggatatccaggcatttccatacatcctctgaaatctaggaggttcacaaagctcagtttttgtcttctgcacacctacaggcccaataccatgtggaaaccaccaaggcttggggcttgcgtcctgtgaagcaatggcctgagctgtaccttggccccttttagcccagctggagctggagcaactgggatgcagggcactatgtcctgaggctgcagagagcaggggaaggaggggggagcacaaaaccattttttttctcctaggcctccaggcctgtgatgggaggggctgttgtgaagacctctgacatgccctggggacattttccccattgtcttgggcactaacatttggctcttgttacttatgcaaatttctacagctggcttgaacttctccccagaaaatgggtttttcttttctaccccatggtcaggctgcaaatttttcaaatgtttatgctctgtctttcctttaaacataagtcccgatttcaaaccatctctttgtgtacacacatggctgtatgctgttaggagcacccaggccacctcttgaatactttgcttagaaatttcttctgccagataccctaaatcatctctctcaagttcaaagttccacagatctctagggcaggtgcaaagtgcccagtatctttggtaaagcatagcatgggtgacctttactccagtttccaataagttcctcatcttcatctgagaccacctcagcctggacttcattgtccatatcattatcagcatttttggtcacaaccattcagtaaatctaggaagttccaaactttcccacatctttctctcttcttctgagccctccaaactgttccaacctctgcccttgacccagtttcaaagtcgcttctacattttcagtttgtctttatagcagtaccctactatcctagtaccaattctctgtatcagtccattctcacactgctataaagaatacctgagactaggtaatttataaagaaagaggtttaattgactcacaattcctctgggtgggaggccttaggaacttacaatcatggcagaaggaagcaaggtacatcttacatggtggcaggagagagagtgaacttaggggaagcattagacacttataaaacaaccagatcttgtgagaactcactcaccatcatgagaacagcatgggggaaactgaccacatgatccaatcacctcctaccatgtccctccctcaatacgtggggattaaaattcagattacaattcaagatgagatttggttgggccacagccaaataatatcagtgtcttagttagactgggctgccataacaaaataccatagactgaatcctttaaatgacagaaattaactttttcacagttgtagaggctgcaagtccgagatcagtgtgccagcatggttgggttctggtgagagccctcttcctggcttgcaaatggccccttcccttccctgctggcctttcctcagtgtgtgcacatggcacgggttgggaggtggggtacaggaaggcgaggggagagagacagggagaactctccttctcttcctaaaaggccacaatcctgtcagattaagaactgcccttctgacctcatttaaccttaattacctgccaaaagcctatttacaaatacagccacattggggatagggcttctacaaaagaacttgaaagggcacagttcagtccatagcgcagagcgtctccatgtggttcatttgtgtgggttaatttgggcttccttacagtgtggtggtatcaggatggtaggacttctttcatgagactcagtgctccaacatgagtgttccggcaaggcacatagaagctactttgcacttatgtgctgtcacggaagtcacatgacatcacttctgccataccatatgggttgacaagtcaccgcattctgcccagattcaaggaacaccacatctcagtctggggagtatcatttaattggcagtcatgtttcaaaaccttcaaaataggggaggaggtggggatggttaatgggaaccaaaaggaaaaacaatagaatgaataagacctgctacttgatagcacaacagggtgactgtagtcaataatgacttaattgtacatttggaaataacaaagtataactggattgtttgtaacacaaaagataagtgcttgagggaagggataccccattctctgtaatgtgattattacatattgcttgcctgtctcaaaacatttcatgtgccccataaatgtatacacctaccatatacccacaaaaaatttttttaaaaccttcaaaacaaataatttgttgattaaatggatggaagaaattacagtagaggataagactaaccggtgtgttgtggtcctctccctcccagtgtatgactactaagactgccttacatttgtgtagcaatatgactcatataaccttgattccaatcttatgagataggcttttttataatataagtggagaaactgaagctcagaaacaataactttccaagagccacatcactggtgggtaagtgcttgccagaaaccatgtagactgtttgttaaacccttcaagggagggaggtatcatgtttgattctattttgcacctctggcagagtgcctgataaaaagcaagcattcagtaaatgttcatcaaactaaagtgagaaaccagttagtggcagatccagaaaataggccttcggtaattgctgggacataagttacccatttggaaaaataaaataaaattgaatgtcttcctgacaaccaactgaaaagcaattcctgatggattaaagtcataaaagactagagcttaaagcttctagatgtctgtacaggaagatatctttatgatatctgggcagggatatatttattaagacgcagaaactgctaactatgaaatataaggctaataaacttgactatgttaatataacttctattcataaggaaaagtgaaaagagttcaaatactgagaaaataactttacaaaacatgaaaccagtgatgcattctaggatatataaagaactactacaatcaataacaaagaaacatcccagtagaaaaatgggcaaatgatatgtagaaatatttcaacagaaacgcacatagcaatcaaatgtatgaaaagatgttcaattttattagtaatcagagaaatgcaaatgaagaccataataagttaccattcttcactcacaagattggcaaagattaagaaaaccaacaatgccaagttatctttgtggatatggatcaacaagaatgtttgtgcactgcttctaagagtataactgattcatcaccaagttggagaaaaacttagtattagaaagttggagcttacattctccacaacctagcacatcctcccactcccacctcagtatttacctagagatacctttgcatttgtgcaaggtaatattgaacaagtgttcatagcaactcagattcccatcagcaagaaaatggatctataaattgtggcacatttatgcaatggaatattttatagcattaaaataaataagtataacaacatggaacaatatagttgaatcttagtaaaagtgaaggaaagaaactgcagaatactgcatacaatatgatactttataaagctcgaaaagaagcaaaactatacaatatataagtggtaaaactggaaaaaatgtttgtcacaaaattcaagagagtagttattttttgcacaggttacctgttgcataagtaaatgcaacggtattattaatgtcctattttataagttgaagggtggatttaatttgtcctcactacatatatatagttatatccatttgcagatatcaggttacacataaaaatttaacatatattaaatgtatccttaattccactaagaaaaaaaaagagaaaaagcagtgaaaacaaggacttcctcatccttttaagctaaaaaaatggccaagtgtcagaagccagcaattatggctgcaggtattagtatttcccaattctgacaagggcttctcaattgttggcttttaaaaagccaacaaacatccaagaagatttcatacctgctctttccagccattttggcgagaaaaatgtacagtgtcttcatgtcaaaacaatcaggcatattctattccagtggcctgctaaggaataaatgcacaagaggaattctttcatgaaatagaggctgaattatgcaagctaaatttgagaagtacagtgatctattgtaatattgtttatttattttttttagagcggcaggctttgatcttgccaattcatcttagccaattagtgatttaaataggaaagctttaatgttacagtgcagatgaataggtcatgagattaagtatatgattttaaacattatgtaatctctcctacttgaccagccatggagacccagctccaaattaaaatacaagaaccagaaccgaccgggtatagtggctcatgcctgaaatcccagcactttgggaggccaaggtgagcggatggcctaagcccagaagttccaaaccagcctgggcaacatggcaaaaccccgtctctaccaaaaatacagaaattagccagtctcataacccagtctcaaaataaataaatgaagagataaaaattttaaaattaagtttaaaaagaaccactaccttaaaacaatgacaaaaaaaaaaaaaagatatcccaaattcatttacaatttcattccttttattttccatgtcttcttgatttttgaaatatgtaagtgtagtcattggtcataatcaatactactaaacttacaatttttttggggtcttaaaagcctagggatccagatataaagcatcaattaccttggcttagtttccccattggctaggcatccttcttttgtgcccctcttttttccaagtacttacctattttttaacatgatgtgtgatattgatgttatctattaatatgtctttcttttccttcatgtgacttaaagctcttcaagaatattcctttttgtttccttagtgccaggaataattaggagctcagtaaatgtaaatgtgtgttgaactgaactagccccaatgaaaatgtatcttcatgcagtgtgatgcctcacttcagcaaccttacgctgtggctcacacagaagcagtgaatcttgcgatggcatattgaattagtagtcagcaagcagtgctggctgtatccccctagcccaggagtgcagacaactacctaagaatgtcctcttcaccatgtagtaagatagcaactttatagtaaatgtcatggactggggcaggggcaagagggagcagaagaactaaattacaaatataatacaattagttatttctctattttagtttaatttttttggtttgggtttttgtttttttggttttggggtttttgttttgttttttgtttgtttgtttgtttttcatttttttttttttagaaacagggtctggctctgtcacccaggctggaccgtagtgacgtgatctcagctgacttcaacctctgcctcccaggctcaagtgattctcccacctcagcctcccaagtagctgggactacaggcacacgccaccagacccggctatactctgttatcctattataattccttagcaaattcaaagttcctaattcttttttgttttttttttttttaaatgagcagggtctcacgctgtcaccttggccagaatacagtggcacagtcacagctcactgcagcctgaaccacctgggctcaagtgatcctcccgccttgtcctcccaaactgctgggattacaggcataagccaccacacccagccctgaattctattttttttttttttttttttctgcaacaggtcctcactctgttgcccaggctggagtgcagtagctcaatcttggctcactgcaacctctgcctcctgggcccaagcaatcctcccacctcagcctcccaggtagctaagactacaagcttgcaccaccatctccagctaatttttgtgttttttagttgttgtagagatgaggtttcaccatgtttcccaggctggtgaactgagctcaattgatccacccacctcagcttcccacagtgttgggattataggcgtgagccactgtgcccagccctgaattcattttttaaatgatattcagagaaatatactatcttaatctccatagttcttttaacggcattgtaatttctcctttgtataatacagaaaatcccactggaataattttttatttatagattttagaaacagaaaatataaagttcttgtgaagaaaaagacaaagtcatgagacggaaggtggggagggtttgggggaaattaagaaactcaatatttggccaggcacagtggctcatgtctgtaatcccagcaggttgggaagccgaggcaggtggatcacttgagctcaggagttttagaacagcctgggcaacatgattaaaccccttctctacaaaatatacaaaaattagccagatgtggtggcatgtgcctgtaatcccagctacttgggaggctgaggtgcgaagatctattgagcctaggagttcaaggctgcaatgagccatgatcacaccactgtactccagcccaggtgacagagtgagaccctgtctcaaaaataataataataatcaactcaatttttgtgataaaattttaaagaatgattaaggatggtaatacagtagtatggtacattgggaaaaacattaaaatagaattcaaagttttttttttttttttgctgtttttaaccattagatagctatatgatcttgggaaaatcatttaacctcagttttcttgtctgtaatatgagtatataatcatacttgtgagagatgcagacagggagagagaatacacattcatattaaaactctttgttacaggaggaagttagcggaaaattaaatcttgtcaccacagagactaaaataaggttccatactgtcagatcatataaatttaaaaatcacttctaagaactttagccttctactctataagcagaaaaacttcacctaaagaggcccatggcctggctgagattcaaggggagaaatttttgttaggaaggaaggtgcaattacagcaagacagtctagaagtgttggctgattccctcttagaaaatccttgggcagtaattctgaccttgcctggagattgtaagagaatattactatgatcagctctgggataggaatgtgcttaagtagcacattttagaagtgccttactcctaccaaagaactctggggatttcccaagacctgtgtctgcctagcaaggagtgtctggttataatagtcagatttctgttgtgtcatttttgtggtaagttaaagatttcattacagttaattagtcatacatatataaattatatatatatatatttttttttttttttgagacagttttactccgtcacctgggccagaatgcagtggcacgatctcagctgactacagcttccacttcccgggttcaagtgattcttctgcctcagcctcccaagtagctggaattacacacacatgccaccacacccggctgatttttgtatttttagtagagacggggttttgctatgttggccatgctggtctcgaacccctcacctcaagtaatccgtccaattcggcctcccaatgctgggattacaggcatgagccactactcccagcctaattagtcatattttaattagacctaattccgggctgatttttctcagaatatccttctacctgtttgcacctgtgtcatttattttgggaataagtagttttaactttaacatagactatgagttttgagttcatatcctgaatgtattttaggctttctgaaagagcagccctgctacatgctgatatggcagattgcagtctacctagtatgagagcccatcctcattaagcatagccatagggtaggaattctgcattcttcagctattgaggctttgtcatgagtctgtgtcctgagctcatggccaaatgtggcccaggaacccaggtacacacacggctgtccccctgtagccttagcttctcgctggctcctttccttgctgggatggccttctgctctggtccttagcctgctcgcctgggtccttaacaacttacccagctcttgccaggcccttctcaccagggattcctcccaagtcccctgcacataactacagcctggattctccccagctctacagcttgcagtatcacactgtctagagactcctgttgctgtgcttcacactacaggacagacttcctggcgctactaaaggcagcctagatcaacccaagttaatcacatccgcaggaacactgtgattggagctgctggccacccctgagggaaccagcccatagcccagttatctccctggccattgtgggtttcctccctttgcaggcacctgctgctagcatcccattgtgcactgatactagctagggagggttccaactccagtcatgccagcatgcacaaattctccagggatacaaagggaggttgctgtagaaaaaggagcctaactattttctgcctccactgaggataacctcagagtaaatatatgcacaacaaatgccttagtactgtaacataaaattatttgttggccaggcatggtcactcaaacctgcaatcccagcactttgggaggccgaggcaggtggatcacttgaggccaggagtttgagaccatcctggccaacatggcaaaaccccgtctctactaaaaatgcaaaaattagctggacgtggtggcacatgcctgtgatcctagctacctgggaggccgaggcatgagaattgcttgaacctgggaggcggaggttgcagtgagctgataatcgcaccactgcactccagcctgggtgacagagcaagactgtctccaaaaaaataaaataattttttagcaggcaaagtgagatacagttggctgtattaagtagtatttagttaaaatacaactctgttacctgctgcaacaaaagatatacaattacagaattattgcagcacagatctagcaccaacaatctaaaatgcagtctctaagctaaacacagtccttttacagatttaattagttgggaaattagggatgctcagggttgaacagcctgggtctgtcatggagagaatctttaaccaatagaaggcctataaggctttagaaacaagtccctcattggctttcaaccaaactgaatccattacacctgctgaatctgtccagagtccatttcttcttaggaaccactaactacccagccatccagatgtgccatgtgtattctgccacctgctttagagaaacatctggtgtctttattaccttgctgtggctaggggagttttccattcccctccatggccctctgttcttttgagtgagtgttgtttgtgctgctgcatatagattcaaatttactgtccagctttcctccactttgtgcagtgctgactcattttccccagatacttgttcctatgcggcttgctgtagtcccttgatctctcttggcaaatgacagtaaggcatttttgaagtgttggaaggcttttgctcgggctttatccagctctccccgtttggtatattggcaaaagagtcccactctgcatttgtgtagaatttacccattatttctattcctgcctttcaagtaggaaccaggttagcaaatgatagaaaattaaatccagatgatttgtggtaagaaatatgttttgtgaaaaagaccactcagtcataaagaatgctcagaattagattatgcaaatgctctgttatcacactttcaagtggtacaggcactgctgattttgattcaaggcaaggaaattctagttagctttttatttatttaatgtttctgttttaaatgagcaggagctcactaaagtataaaagaaattaggtcttcaatagggcctgcctcgtaatcacctatgtgcttcataacccaacggagatgatgaataaatttgctgtggcctcatagtttataatttacctgtgcactgtttcaaccgaaatggttttcatgctctttaatttcag

SEQ ID NO: 12 - DNA, 2644 bp, Homo sapiens
  source 1..2644: mol_type = other DNA
gtgagtttatgttttcttttcttatcagaaaaaaaaaatgaataaataaaacaaaatactggttgaacatccctaatccagaaatccaaaatgctccacagtctgcaacttttgggtgccaacatgatgctcagaggaaatgctcattggagcatttcaggttttgtgggttaggcgtgctctactggtaataatgggaatattccaaactccagaaaactccaaaatctgaaacgtttcaagccccaagcatttcggataagggatacccaatttgtgcaacaaaaaacagaaaatagggaaacagatgggttgtaatagaataacctgtaatacaatgtattttgtatttagtggttttaaattctacaactcctgttaacctcatggtgacagacaaacaactgataacttaaaattgttctttaaccttgtacaagttttatttatttcatgtgtgttgagcttattttcccttccctgttttacattctttaagagctgttctcaggtcttagtagttgatttgtcttttcactcccttggtcatacagagatggggcactgattataaaatccttaccgatggagagttttaaaaccagcaccttggaatggagtatcctatgtttaacacatgccccttaaaagatgagagattagctgctgaaagatgcctctcaaactttttcttttgtctaatgccagtcaagtcttccaggttcaaaaataaacttggctccagaattaacctttttcttcttggaaaggaaatatactccatgatttatttccaggtcattcttctagccagcaggactggaaataagtttggaagaaatccaaatcaagtgttgtcagcatgttagctataaccacaggcaccactgagatatgggtacctttctcccacgtaaagccctttgatcaccttgtatcctcttccttcactgagttagaggagaaatgtgattgatctcacttacctgaccctttgtcttcctggtcaattcttaattctgtttggagcatgaacactgtattagttaagatatgtttggttgcagctaacaaaaccctgtttaaacgagagatttatttgcttgtataactagaaggtcgaggggtcggtgagctgcatgggttggtttgatcctgatgcacagtggagtcattggccaactgatttttctatttctctactgtgtcttcctcagtgttagttttatctaaagggtggcttcctttcattcctaaaatggctataaatctaaaaactccaccatccagaaagacatagagaagccaccagtaaacctctcctcatgtcttaatggcccagagtggatcctgtggttaatcctgaattcccttttagtcaatggaatacgaggcctgggttatctgaacagtcctgagggcaatgggggtggaaggatggcccaactggtgtagaagtcacacacctagagttgcagataggatcaggtcctatgtgaactacatgggcgctgcaaagtggggcagaggtagaaagggggttgagggagagtatcggaaaacaccactgaacagtgcgttaggtcagtagtctcaaatttagtgtgcatcaaaattacacggagggcttattaaaactctgattataggactcgacttttaagagtttgcacttcagtaggtttagtgtgggggtcccaagaatttgcgtttctaacaacttccctggtgatgctgatgctcctagccagggccacactttgagaagcagtaaatttcattatgtaacattgttagaagaatgggacagattaataaaattgtatctttttttttttctggtggtttccttcttattgcttcatttgatctcccacctaatactttttatgcaaatcttagagtctataaatcatctttttttacaaaagctctataaaactaaaacatcaccttttccccgaagcaacaatagaatgaattattcagctcttatctcttggtttacttcataaccagatgctgattactgaattaaaattttgaattggaaacaattagaaatttgctaattggtaatgcactgctagatttattcattcactcagaaactatttattgtgtatgtactatgtgcaatatattgtgtttactgtacctcctaaatttattcttcaaattcacaactaatttccaagacaccaccaggcttgcctttctataagtgctacacacagatacacgtggacatgacatagtggactgcagaaacctgttttatcaagcacatctctacagaagtacttcctggagtttgggcacagaagtcaatcttcatatgaaagtgaaacttactcaattgatggtgataaaaatgagttgtttttttcaaacaattctcctgcctcagcctcctgagtagctgggattataagcacacaccaccacatccagctaatttttgtatttttagtagagactggctttcaccatgttagccaggctggtcttggactcttgacctcaaatgatccacccaccttagcctcccaaattgctgggattacaggtgtgggccaccgtgcctggcaaaaaatgagtttctttttattgctaatgccctgtatttttatcttcctttcag

SEQ ID NO: 13 - DNA, 979 bp, Homo sapiens
  source 1..979: mol_type = other DNA
gtaagttttattatttttctagattaaatcatataatttaggcaaatagtgttacctcacagtttgttttactttccagatacaaaatttctaaatcatagttcaaataattatttaaaaaatgatccagtacctaagtccaccaccccttctacagaagagacaatcaaaccaaccaaaattagattttaggctaatgagggtatataaaatttctagagacagtccagaggggacttaataatcttttttttttttcataatttttcttggtagtttatagttgtgtttaacagccttcagtgccttaaaatttttttttgacttgcattgtttcctgcattgtatcttaaactagtctcttcttactcagtcctgggtcttttttcttttcttttcttttctttttttgagacggagtctcgctctgttgccaggctggagtgcgatggcgcaatctcgcctcactgcaacctccacctccctggttcaagcaattctcttgcctcagcctcccaagtagctgggactacaggcatgtgccaccacgcccagctaatttttgtacttttagtagagacggggtttcaccatgttggccagaatggtctcgatttcttgacctcatgatccacccacttcagcctcccaaagtgctgggattacacgcatgagccactgtgcccagctttcctgggtctttcttcacttaattttgcctgttctccactgaaacatcatttgcacaagtttactgaaacctgttcatattttgaattgccgtctcccaaggcacctggcctctaacagccaccccaattccagcaacatcaaaatgatatttaaaggattgtcattattttacttgaatttcaattactacacaaaattcctagagctaccaaaaggcaccatgccaatactaaataaaccagcaatgagtggaaaatttgatatatgagaaaatgattttttgcag

SEQ ID NO: 14 - DNA, 4353 bp, Homo sapiens
  source 1..4353: mol_type = other DNA
gtattataaatgtttgtctttcttttgtttttaatggaatattttaagaaaagggtttactttgttcaccagtgtcaaagtcagctcagagactgatattcctgtgtgtgcactgtatctctaattcctcagacttacaagacttttagctttttcattgctcattgacaacctgcttggtgtggtcacaggataagctgttctaataaaaatagaatggattaaataaattagaattctgttgctcctctcctaaatcaacaatccagcactggtaagtcctgctttaatatgaaaaagaaaaaaggaagaagtagacagggattctcagtcatctagccagttctaccgtgatctgcctctctagctatccaagtaaccatgaggacccttttttccttacataggacccattcaccatttgttaattcccagttactgcctgaagctcaaagaccaggatctctgggtgatacagttcttcctggttgtagcttctcataatccagcaaactataaaaggaagacaagttatcagctcctcacccccacaccctcccccaacactcccagtgatggcataggaaaagaataaccgcactgaaaagtcccatttggaaaaagaaagactgggaaacatagcaagctcatagcaattttctaaaattttcaaattcctcaggaactgggaagattctgtactatggtgacgtttcttggttagcttgttggactaaacttgggtctgctttctcataagaattcctttatcaattttactccatggcccccagttttgcccacagggaattgtttttgtccattatccttgatgaccatatcttgggggactgctggtcctgctaatgtcaggtagaatcccaagggttgctttagggatcaaataatccaaacttttgtaggccagacttacgatatctttggtaatacagcctcctcaaaaatgtaggtttgttgtctgtttgctgctaatcagatgcatgtcaaaataactatacccaaatatcacttttggtcatagttcttaaacttgccaaatcttatatactgtcttctgaatttatccatctcactcttcctccatttaatgaagtctgctttcaggccctctgaacatagtgagcttgtggaggaaggcagcattctcaaattcatgtctgcagttcagtaactcggagtgacagccttttctcttaacactaggaacacagagcaattggcttttccaaccatctgaagattgtaggccataggcagaacctccctgagcagaattcttttccttccatctttagaaactggccaattctcacccaagcttatctctcccatgtaatctttcaaaaagcaacaaatgccaaaaaaacacctcccaacagtattagctttcccaaacaattcctctaggctaagactcagtaggtacatggcctgctgtctgagttatggcaagcaacagttttcacaaatgcccatggtataatgagaacctgcttcccagcctgcaatgtctgggtccttaccttccattcctgtacatttttcatttttattgttagtaccacccaatttctggtattaatctctacatatgttagggtccaggctaagggacttgacagaagtcaaaagcacagttaactcaaataagataaaagttttatctttccagaaagtagattagaggttaccagggaatggggagagggaagactgaggagttaatggttacagagtttctgtttggggtaatggataagttttagaaacagatgatggtagtggttgcacaatagaatgagtattattgccgttgaattttacatggctaaaatggcagattttaccacaatttttttttaaaagatttgtcttataactgtaagtcaagaggtgagtggtccagaggtggaagacagctctaccatcctcagggtgtggctttcagggtcattgaggtcatcttcagttcacagccagcaaggcaaagatctatcagacatgacccagaaatttcactcatcacttcattcacatcccattgtcccattgagtatcacatggccacagctggctttgaggaaggctgggaaacgtaattaggtaaccaagtgtccggcaaaaattcagagttcagccaggcacagtggctcacacttgtaatcccaacgctttgggaggccaaggcaagaggattgcttgaggccaggagttcaagaccagcctcagcaatatggcaagacctcacctctatgaaaattaaaaaaaaaaaaaaaattcagagttatattactaaaagaaaaaatgagagaacagatattgggagaaaattggcagtctagagagaagatctggagaaactgcaaaaaatgaaagaaaaatctaattaaactatttaattttagaacttggagaattacattatgtatgtttctcttctatgttttccattttagttttaaaataataataattataacagataattatatagtgtttggttatgtgccaggcatttgtctaagcactttacatatattttcatttgaatcttcatgattactctccagtgtatgtatttttattttccacatcttgcaaatgagaaaactgagggtcagaaagctccagaatttgcccaagatcaggtaactagtaaatggtggaaccaaattttgaatgcaggtagtgtgacctcagtgtgtgattttccttagaaaccagtctataaataatttgctgatttgattattggaatcagttttttcttttactttaacatttacttacttcctctaggagaattacttttatttcattgctaagaaaataataaaataatatcaatttttgtatttttaatacaaataaaatataaaagatatttgtaatgttaatttgggaaaaatccctgaaacatttttaaaagcagaattttatggtgccttagttcatttgtgctgctataacaaaataccacagacgaagtaatttatgaacaatagaaatttttcacagttctgaaggctgagaaattcaagatcaaggggcatcggcattcagtgtctagaaagggccttttttctatatcctcacatggcagaagggggaagggcagaaaaggcccaagttctttagctgtagcccttttataaggcactaattcattggtcaattcccaaaaggccctgccatttaacactacctcaaaagggattatgtttcaacacatgaattttggggaacattcagaccatagcatgtggcattaagtatattcacattgagaatatgtttatatttttctgcagccatcacctgtatccacctgcagagttttttcatcttccttaactgaaactctacccattaagcattaactccccattatcccctatccccaggccctggcaattactattctattctgtgtctctgtgaatttcactactctaggaacttcatataagtggaataataaaatatttgtctttttgtatctggcttatttcacttagcataccttaaagggtcatccatgttgtagcatgtgtcagaatttccttccttgtaaaggcagagttatattccattgtatatatataccacattttgtttacctgtatatctgtccatggacacttgggttgcttccatcttttggctgttataaataatgctgctgtggacatgggtgtatagatctctcttcgagtctctgctttcaattatctttgttatttactgagatgtagaattgctggatcatatggtataatttttttaggaatcaccataccgttttctacagcagctaaactactttacattctcatcagcaatgtgcaagggttccaatttctccatttcctcaccagcacattttctatgtttttaaaaatagtagccatacaactgggtatgaaattaaaaagataaattttacgttatgtgtattttaccacaataaaaatgtccaaaggaactgaaagtaccaatatttggtgcagttctgtcagtagaagtaaatatggattcgctatattccttaaaaatatattttcactctaagtttgtagcacctacaattttattaagacctcatagttctgaagtttaaaaagtcataaattgtttcagaaataaaacgaaatcatgaatccaaaaaaaaaaaaaaaagcctataacaccaaaatggaaccagaaatttaaatggtctaaaaatatttgataattttacaaacctaaaaatacatacagtaattcttccttttagtgctttggatcaaattattgattagcctttattttgttgctgttgtttattactag

SEQ ID NO: 15 - DNA, 2207 bp, Homo sapiens
  source 1..2207: mol_type = other DNA
gttagttcttttttttttttctatgactgttttgctataccatgtcaaccagacagaaggcctcagaacataatatgcctttgaggacatcctacttttccttcatttgagagaagtatattgatcacctattaagtgttagatagtgtgcttggttgtagggactgcttattgtttatattgctagtataggcctggcttcactgtatcttatatcttctttaggctttttatactaattcctaacatgacatgtaggttctaacagagagttactaaagttactggctttattctcttcactagggatttagtagtcatagcatggctgcttatgaatttgtataaaataagctgacaaatatgacgtacataaaaataaaacatacataaacaaaaaacatttaatattccagaaaccacttgttaatatacaaaactaatataaaataatatacataaaactagtatctaataactaatataaaataatatgtataaaaactgttatctagtaactataatgttaaactccataaatggtacatatttgtttttgtataattcactcattcattcatgagacgtttatgaaataactattcagccttaggcagtatgctaaatagtaggattacagaaaggagtaaaacaaggtccttttggctgggcatggcagttcatgcctgtaatcccagcacttcgggaggccgaggtgagaggactacttgagacccagagtccaagaccagcttgggaaacaaagagaccccaaccctgtctctacagaaaaatttaaaaattagccaggcatggtagcacatgcctgtaattctagctacttgggaggctgaggtgggaggatcccttgagcccaggagttcaaggctgcagtgagccatgatcatgccactgtgctccagcctgggtgacagagcaaaatcctgtctctaaaaataaaaataattttttaaaaagagacaaggtctttttctcaatggatttgtcacttactagaaacaacagaagtgtgaacaggtaattactctacagtctgatgcatggtatacaagaggatggctcagagagttaacaggtttgtaaagaatgtttccttcagtggtgattgcatacactaaaattttccttagtaaccacctgattaacttaattcatttaaaggagttttccttctaatttgagattggcatattcctatgcaaagtgtcctcttgagaggctaaagtgcgaggatcccttgaatctgagagttggagtccagcctgggcaacatagcaaaactcactcactctctctctctctctttatatatatatatatgtatgtgtgtgtgtgtgtgtgtgtatacatacatgcgcacacacagacacatgcacgcacacatgcacatggatatatatatggaaaactatatctttgtatcctccatgagtttcctcacttctcttcacggtattcctcgggctgctcctccatctctcacattgtgaggttgccttctgaactgccatgtcctttgcagagccaggcatgtttttatcgtaacgtatgtaacaaaatgtaaaaaataaatacataagaccatactcatttatccaaatacagtaaagtgaaaaattgaccacagcaatataatttgtggttctcagaagtttctccagctaaaaactggaattgctgtgtccagataaaccttcacagaaatggggtaatgagaaactaaacccagtgataggaatttctagataacattgaccacaggtcacatctgatgtgttttccctagctttcttaggagtctgactgtcttcattgaagaataatcatgtacatgactttagtttcactagtgcttttttccctgaataacattcttcagtcagcgttctctgagataaacttgagctttggtgatgaattgaggaactcatggcccagttctgggggtgttaaaagaaaaaggggctaggaccataaaatcaataaccccgaagagcaaagtgtgcttccataatacagcctgctttcctccctcacgtttttcctcctcctttacctctttccgccttatttatctgtattgagtactgcaaaggaggaagcaccatgctaaaacacaggtggtatttatgagtatgcttgcttccaaaagcaagtagatcactaacttttccttttccttacag

SEQ ID NO: 16 - DNA, 3969 bp, Homo sapiens
  source 1..3969: mol_type = other DNA
gtactgaggatcacgttgttggaagggaccttagggattcagctatgcctactttaagactctactcttggccaggcacagtggctcatgcctgtaatcccaacactttgggaggccaaggtgggaggattgcttgaggctaggagttcgagaccagcctgggcaacatagtgaggccctgtctctacaaaaaatttaaaaattaggtcaagtgtggtggctcatgcctgtagtcccagcactttgggaggccgaggcaggtggattgcttgagtctaggacttcaagaccagactgggcaacatggcaaaactctgttgctacaaaaaatacaaaaattagccaggtgtagtggtacatgcctatagtcccaggtacttgagaggctgaggtgggaggatcacttgagcctcagaggtggaggctgcagtgagccaagattgcaacactgcactccagcctgggtgacagagtgagaccctgtctcaaaaaaaaaaaaatgaaaaattagccaggtgtggtgtgcacacctgtagtcctagctgtgctgaagcaggaggatcacttgagtccaggagtttaaggttacagtgagctattatcacactgctgcattctagcctaggtgacagagctagaccctatctctaaaaaaattaatttaaaaaaagactctactcttccatatttctcacatgggcttcttagtatacagatttaaaatgtgggtctgaagccagaatgtctggcatcatcatttactaggtaggttacttaatttttctgtgccccagttttcttacctatattataggtcctataaactgggaatattagtagtacctgctttgtatggtcactgtaaggattaaattggttgaatacatgcaaagcatttagaagactgctcagcacatagcaaaggcttaatcagagttagctgctaccattgtcattatcatcatcatctagtttgtgcactacatttacttaattgaatattgaccaccacccagacatggtggctcacacctgtaatcccagcattttggaaggctgaggtgggcagatcacttgaggtcgggagttcaagatcagcctggccaatatggtgaaaccctgtctctactaaaaatacaaaaatttaacaggcatctgtagtctcagctacttgggaggccaaggtatgagaatagcttgaaccctggaactgagatcacgccactatactccagccagggcgacagagcaagattctaactcaaaaaacataaataaataaaattgagcaccaaaatatttattagataatctgtctgccaataatctatggccactcccttcagtctggctgagaggcagcacagtttagtagaagtagcaaaacctttgcagtcagtcagatttgagtttgaatgcttgagtgacataacctctttgagattctgtttcttcctctgtaatatgggactggaaatccttttacaggattgttttatgcattaaagactatatgtgcaaatcatcttccccagatatcagtggtaacaattataaaaatgttataattgtgtctatagcatgtaataactatagattccatagtgtttcatcagatacaaaaggatttggatctctttctccccaggctactttctaaagcaaagtcaacctcttacaattactaatcatttaaatagatcaaaggagagtatagtatccccctcattcagtaatacacacaagtttgtaatccactgactttgagtgctgaaaagtaggttgagtaactgtgtcatctagttggtgggcagaagtgtcttttagcacctaagtgattatcctggtgtattagtcctttctcacagtgctgtaaagaactgactgagactgggtaatttataaaggaaagaagtttaattgacttacagttctgcagggctggggagacctcaggaaacttacaatcatggcagaaggggaaacaaacacatccttcttcacgtggcggcaggaaggggaagtgccaagccaacaggggaaagccccttatgaaaccatcagctcttgtgagaactcactcactatcatgagactggctaccccatgaatcaattacttcccactgggtccctcccacgacacgtggggattatgagaactacaattcaagataagctttgggtggagacacagccaaatcacatcacctgctgctttatggacttactttcactaatattatgacctaaaagtaaaaccctgccaaatatagatgagtcttatttttaaataaaaagtatcaggatatagttttaaccgaagaactctttcaggagtaatcctttaatattggagtctcctataactgtcctcagattttctttccagcgtcaaataacaattcttgctacctcattctgctgtctcactgccaggatataattaatttcttttgtactgagagatctggtcattgctaccagcaccctggtgtgggtaacagagagtaatctttgtgaaagtagtgacctagttaatacttacttcctgtcatcttaagatgttctcttcataaaggtaaaagggattaacttgttttatttgtctaactgacttttaaaaagggtattcagaataggttttaaaaagaccaggtactgtctgggtgcagtggctgtaatcccagcactttgggaggctgaggcaggtggatcacttgaggccaggagttcaagaccagcttggtcaacatggtgaaaccccatctctagtaaaaatacaaaaattaggctgtgcacagtgactcacacctatagtcccagcactttgggaggccaaggagggcagatcacctgaggtcaggagtttgagaccagcttggccaacgtgggaaaaccccatctctactaaaaatacaaaaattagctgggtgtggtggcaggcacttgtagtcccagctactctagaggctgaggcaggagaatcatttgaacccaggaggtggacattatagttagccagtatcttgccaccgcaccccagcctgggcaacagagcaagactccgtctcaaaacaagagaacaaaattaaccagcgtggtgttgtatatatgtaataccagctactcaggaggcagaggcaggagaattgcttgaacctgggaggcagaggttgcagtgagctgagatcatgccactgcactccagcctggatgacagagcaagactctgtctcaaaaaaaaaaaaataaaaagaccaggtactattagtcttctgagcaaaagaaaagggggaaaggacacgtactcccaaaatgaagtctgatagcttttggagaatgaagtctaatagcttttggaaagaccacacagatacgacactgtacaagaatagtctaattgatagtataatttatgcattttcccaggctaactaaaagcattctgtttcaaaaaggcctgtctagtttataaaagaagcttatttaattgtgattactgattctttcctcctcaaataaaaggaaaaaccttatcgtcagaaattcagttttttattccgattttaatgaaaaggctgcctagtgagtcaaactgtatcttttatttcaaatgtgggtttcagcattgtttagtgtttagtaatcccatctttgaaaaagaaaagtagaacctcattaaaataaattggacattcagctgtcggtgtgacatgcattcttcattcttacctcgagatttttcaataaaagaaacttcggagctcacacagaatgttagtggggttattgtttgtttagctttagtttttccattttagcaaaataacctactttctaaaaggtaaattaatgtttaaaggcatctctggtaacagatatggcttaatgactggaagaggccatgccagtgtagttgctagaggagaattttcctatgttgccaacgcgtgtttctggctcctag

SEQ ID NO: 17 - DNA, 16859 bp, Homo sapiens
  source 1..16859: mol_type = other DNA
gtgagttttttttttcccccagtaaacctgccaattagtttttttagaaaacttcttgactgctgtcaggtttctgctcctaacaggttttttcagaagctgaatgtgttcaagaattttataggccttctgcaaaaccaaaattttccttatcctgtcctctttcacaacatatttttacttggaggttcatctaccagtgaaagatgtttgttgaataacagcctatggaaaaagaataagactatctgtaaggaaaggttacaaatactttgctttttccttttaatcctttaggaatttgatataaatttctcagaaaaactgtgctgtaatctgtctcttctgcttatcaatgctttgtttactttagtggtttttcaatcctcttagaccctttactcatttttaaataataattttgtaacatttgcctttactaacttcaaattaaaatcatagataatatagtctaaccatgcaaagaatttgccagagtggaggtgtatgtgtgcagtagattaaaactgatttttttatttctgaaaataaaaagtacatttattctcaactttgtaatacagtccatttaattaggcccagactattctagcatgaaccatatgaacttgctaacatttaaccattattaacatatgaaaatgtctagttcagcaattcaccgtaatagttgaaatatactgttatttggctgggcatggtggctcatgcctgtaatcccagcactttgggaggccaaggtggaaggatcgcttgagtctaggagtttgagaacagcctgggcaacgtggtaaaacaaacaaaaattatccaggcatggtggtatgtgcctgtggtcccagctactcgggaggctgaggtgggaggatcacttgagttcaggaggttgaggttgtagtgagccatgattgtgccactgcaccacagcctgggtgacagagcagaccttgacttaaaaaaaaaaaaaagaaaaccacccaaaaaactgatagtaacagaaatgaaggtacagttttccaaatttgaaatctctgtatgtctctaaaggtagacttaaaaaacaacaacaacaaaaacaaaaacatttttattaggatacttttagattcatagaaaacttgcaaagatgatataaggattgcctgtatacccctcagcctctcacccctacttgtaacatcttccattccaatagcacatttgtcatagctaagaagccagcattgatacagtactccagactgaacaccacagtttatttggattttactagttttccttaatggtctttatacagagaatcttcttaaatccatacggtgtcctcactgaatataaatagaagaaatttttgtatttttcaagtgataatgcttggatatgactatgcagtaagacataatgaagtatgctggaggtttgcactgtatggaagtaaccctgaatggagcagcagcaagtgcaaactgatggaagtggtttatgttgtcagctcaggtcctagaacagtgctgacaatggtggcatgaggttccaaaatgatgaacacctcctgggaaacttcaaaagaaagtaatctcacttcaacttacacagtagatcctagtacttgtagtcttagaaattaaaatggtgtaaaaaatgcttcgcaaggctaggcatggcagctcacacccacaaccccagcactttgggaggccaagggcggcagatcgcctgagctcaggagttcaagaccagcaacattgtgaaacccagtctctacaaaagatacaaaaattagccaggtatgatgacacacacctgtagtcccagctactcagaaggctgaggcaggaggattgcctgagcccaggaggtcgaggctgcggtgagctgtgatcgcgccactgctctccagcctgggtgaaaaagtgagacccggtctcaaaagaaaaaaaaaatgctttgcaaaaatatgtacagtggggttagtttctcggtttagttacagctagtttttttgatttatgtgaatagtccagcagggggtatgaatgacgagcaggatatggaacagtctttttgttgtcctgacatgtgcagaatcagtcctgtgcatccagcatccctatatcccagagtagccctaatcattgtaataacccaaaatgtacccattcatttccaaaataattctgtcacctttgtttaaaaactggttctttcaacattttatctttaacctggtgcttccatcttttgttttaaaaaacagaggggaatagtatatgagtatgtccagagaaatgtcctgatatggccatttttaatctctctttaatccaaggaaaataaatctttcagaataatctttctttcttaggtgtttttaaaattcattttcatagcactgactgggcgtggtggttcatgcctgtaatcccagcactttgggaggccgaggcaggaggattgctttgaccctaggggttcaagaccaggctgggcaacatggtgaaaacccatctctaccaaaaataaaaaaaattagctgggtgcggtagtgtggctaggctttgcaaggctaggcatggcagctcacacccataaccccagcactttgggaggctgaagggggaggatggtttgagcctggaaggtggaagttgcagtgagctgagagtgtgccattgcactccagcctgggcaatagggccagagcctgtctcaaaaaataaataagataggccaggcatggtggctcacacctgtaatccaagcactttgcgaggcccaggcaagtgggtcacctgagggcaggagttcgagactagcctggccaacatggcaaaaccccatctcaactaaaaatacaaaaattagccgggcatagtggcacatgcctgtaatcccagctactcaggaggctgaggcaggagaatcgcttgaacccaggaggcagaaactgcagtgaaccaagatcgtgccactgcactccagccagggtgacagagtgagactctgtctcaaaataaataaataaataaagtctattatcatagcactaggattcctgaaatatttatcgtgtggaccttctatcaatgtccacactgtggttgacatttcctttaattaggataactccagtttacatttaaaaaaattttttgtaatttagaagtcaaaaatatttttcttaattttagacttatggtatattacttatattatccaaaatccagttatatgtttgtacatagattaataatgacctgcttttaaaatagtggatgctcacatttttggatctgaggaccctatgaaaatctgatttatgctgtgggtacctcttgtagaaaaatacacctacaaatatgcatgaaattccaaaaggctcacagacccctcgaagccctcaccataatgaatctcaagttaagaactcctgagttatagcagtttccttcttatttgatgatttcacaaggaagcattttggtcttttaatcacatttattaagataatagtgatcttcaaatagggttttcagtgctcttgatgcatgttcgtttttcaggcacagtcctcttatcaacttattatcatatgcttaccatgtattccatcagttctccacaactcattccattgttcccattatttcttacattaattgtgatcttttgagatagtcactttagtactagaaagatcttttcttggtactctgacattttagagctgtctgactcgtgactgaactattaatatatatattgcattcaccagcttagtgtttctctcttgaaacagtagacatattcagttcttaaagttttgcctaacctcatccatgagcacaaatgtgtcatactgatgaataatgtgttggtacaattctttacttggtcatatcttcatgagattatctttgaaaaatctcttcttgtctattaatcctttcagatagcctgtaatattttaagaacttttaaggtcatcacaagtgatcactacttttgtttttcataggcaccgatccatatatttgcaaatttataatttcaaagccttttgtactgacctaaaatggatgatagtgaaaacagagattgacaacttctatgttcactaatacttccagcttacctaagaaacatatagtgaattaaaaatttgccatatgtattcagtacattggttttaagaaatggcagctcagtgtttgagctctccactgtggcagttggcaggtttcatgactagaagggctcgtttgagcttgtcatcgtaatatttaaacatgttggcaagaacatcccgttttcaaacatgtagatgcactagttcaatatgtctgctatctcttcattcaggacgtgagtttcactcgtattacgtttacagggtaggtaggtaattttgaagatagcaatcaagaggtgatatctgtagtatctgttcctgttgcatggctttattgtggtttgagctgtcagtaatcactagcctttgaacttctgtagaatagtaatgcctcttagcctccattgtgatgtctgtgttgtgttgtacattaagagcggtgatgaattttgaactgtaaagatgtcgttattctaaggaaacacataagaattacactaaagccttcttaattaaacgtgaaagggatgggcagaagaacttcaaattgtgtgacatgaaatcattaatttggttaaaaactaataaataaagcagcttgtctgctctaaatatttggattagattctgctgtagataaatgtaccctgtattagtcaggaaggcaccctggtgttatgacaagagcactggatcaaacatcatttgtgtatctgtggacctggctgtatgacttggggacagttatttaaactctttgaaccatctcatttttcttattcagaaaatggggacaacagcaattctatgtacttccctggacgattgggagaattaaaccaagcatatgtgaaaaggcatttggaaaagcataaggagccatatgtacgtgaagtattcttgaaactatgcttatgtataattcaactcttttgagatcaatatacaactcaaaactagaaagggggtaaaaaagaccatctgccctgagacaatttactgccacttgaggttcaacagaattcacaaatgcttaccttcagtgggttttgagtgaagatctgtggaaggtgattggaaaccctcacgtttgtatttggttctgttttgttttcatgattgctgcctacttagaatttgatacctgaaacagtaacagaaagagcagcttggagtattgggagtgatggaggattagctgaagagcaatgtgggtatgtttatctccagtattaacccccaggaagcgaaagacaagcgaaagacaaggttagaccagccaagaccatacctagtcaggcagaatatgcaggctcagaagaagataggcagctgagacttactgaacatgtaccaggtgccaggaaatatacacactgctttacattcattcatttttatcttcacagtacgctctgaagtagatgggtactgttattgtccccattttccaaatgaaaaatctgagacatagaaggacctgcccagggtccaatagtcatgacctaactgctctactttattgcgtatttgcgctcccattccatgcactggagacaatactattattcatggtctgaatttggtcttccaaatgtgttggatgggcttccttctcctaagtttattaaatgacactctaataatgtagaatgaatgcaaatgtggaatgaatgcatttatttatttctaggtttccctctgtgtgagttgactgttgaggtttcagtcctaaaatgcagtgaactccctatcatcagctttgtggcctctgctgtcaccctgtctccctagccccaactcctgcacactgttttagtttgtgactttaacatcagatgtaatttctttcaagatcttctttttgttattttatttgtttgcttatacatatataaacaatacatacatgtgtaaataaaataaatgaagtcataaaccaaaatatgaatgtattaatgcataatgtttatttgggaatgtgcttatttctttcatttgcttagtgcattttctacatgtattattttttaaaaatcaaaatattttttaaagagagggatgtttagttttttgtttgtttgtttttggagacagggtctcactctgtcactcaggctggagtgcagtggcacaatcatggctcactgtagcctccacctctccaggctcagttgatcctcccacctcagcttcctaagtagctgggaccacaggcatgtaccactacaccagggtaatttttgtattttttgtagagatagggtttcaccatgttgcccaggctgatcttgaattcctgggctcaagcaatctgcccaagtcagcctcccaaaatgctgggattacaggtgtgagccaccatgcccagcctatatagttattttaagaaacagaattattgactatgtgtctgacatgtcatattacctatggtaggatggggttcaaaagaaagaaaagttatagtatcttgaatgttcagaatttagcttgaggacatgaagtgcaacaaataaaaaattaaaagcataatattaagtaaaataataaaagtagaattttaagtattgaaaaaaagtagagaggtgagaggttgaggtcaagaatgataacaagggaaaatatctttgagttgtttaagtttgaatcttcatacagaaatattctccccagggcttcatccatttcacagatatttattggacatcctctactttctgtgctggattttggaaatacagtggtgaataaagcatactctctagcatttgagtttgaatagtacctttatttgttttcatcttaaaaagaagcagtttaaataagatgtacctgatcaggaaggtacagctagtttgggagcaagcctgtgaacttaatatgcagtattcaaaacttctccaaattatgttatttcctgggtcctttaaaggatgatggtgatactgaactgttgaactatagggcagttgtgaagataaagaaggatgtcaacacattatctttattactattatttccagtgatcactcggtatgtgtgaagttaaaactatggccttttaatcatctgtttatggcaaagtctagtagatagtggtcactttaaaaaaaaaataccttgccttgttatataaacttctccatcatccctggatttagggatagattagacaggccaggatgtggaatgactgctaagaaatcagtactggatcacctcagacagccaatgtcaggtctcctgaggcctgtcctttttcatgagcacaatacacttattgatttcagcaactgccttttctttgagttgggatttgctatcatggaaataacacttagttgtagccattaaaagcaactgttctcttaattagaacagtcacatgtaagatttaggcctttaaatacagcagaagctcataggacttccgaagcttcaatttatatgattctgttcctgttcttattgcactgtaggaattgcaaagttaatctctatagcatcaagttatctgttgtaaaaatctgaaacagagtacattttagacatcctattgtttgtttaaaagatagtaaagacagccaggcatggtggctcatgcctataatcccagcactttgggaggcagaggcgggcagatcacgaggtcaggagatcgagaccatcctggctaacacggtgaaaccccatctctactaaaaatacaaaaaattagctggacatggtggcgggcgcctgtagccccagctactcgggaggcaggagaatggcgtgaacccaggaggcggagcttgcagtgagctgagattctgccactgcactctagcttggatagtgaagaaaactctcttatttatttatttatttatttatttatttatttattttgaggcagggtctcactctgttgcccaggctggagtgcagtggcatgatcatggctcactgcagcctcagcctccaccttccaggctcaagcgatcctcccatctcagactcctgagtagctgagactacaggaatgcaccaccatgcccagctaatttttttatagtttttgtagagatggggtttcacaatgttgcccaggctgatcttgaactcctgagctcaatcaattctcctgcttctacgtctcaaagtgctggaattacaggcatgagccactgtgcctggccaaaatcgtgtatttagacaactgtcttcctctcaagaacttctaaccaaacaggaatctaagtttacattgttttctaggcttttgttatctaaatatttcctgcagcaaaaaaaatgccctaaaactctttgaagtgtcagctacaaaaaatatttgttaattggattattttgtgtgttttttactgctttatctgggaaatacattagcatcaatagttatcatggcccataagcaactattaccaacaccttcaaattgtttgcattgataactatatgaagtacttttttagggttctttggattatagtttaaaaactggggaatggtatttgttggctggtcaacagtgagtaatggttcagcacccatgctgttttgtataagatccattaggctgctagattgtgagtcttacccatggtttctgtgtggacatacacagtggctgactgcattcctttctcttgagaattcggttgtttgctgcaaattgagctttcaaattttgtaggttctttgtcctccttttttgaaaaatatttaaatgatgttgcccaaagggctcacagagaaacagcatgaccaactttcgggaaattagtaagcactagggttatttttagctttttctccttacaaacatttccttttgttctttagaagacattgttgatctttcattcatttgctgtgctgtctccccagctacaaaatggcttttgaatagaataagcgctctcttctctactctgcatgacattaactgtgttcttattttattcagtttttactctagctcatgaattatcatttgtgtattttttttctggatattgaatcctcccctacacacacaaacacacatacacacatttttgttgtcatttggggttgacttcctccctcatatgcaactaatgactgaaaaatcttcatacaagcaggatatacaaagtctgtatttttgtcagtatatcatatggtggtggctgatggtgtgatttggcctttatttgctgttagtacctatttaaaaaccatcaccttgagaaaattgtgcagtagtgtcacgggatccttggggtgtcgcatcaccagccagaaacctctgtgaccagtggtacctttgcccaggttttgcttgggcccactgggcccactcagcctggcaggctgcactcagctcgcactactggcctggatcccatgcctgccaagggcaagtggagtggcaaggggtgcatgagtgagcaagcatggggtccagccactgcacacagccaggcatgctggctatggcggtgcaagcagctccaggtgccagcacaggcgctggaggcaaggctgcctgcaaggctgcagccggaccaggcgtaccacaagcagctttcacagctggcactggggaacacagtggcacccagaagcttagagacgctgggaaccacatagccccaaagaaggtatcacagccctagctcagggagctcctaggtctgggttccctgaagggccacaactcttctctccttgttgcccacagcatggcgagcaaggggcatgtttcagccctgtttgtgttatagccctttaggccccaccattcggcaggtcccgagttcctgtcccgtgcccaggaagaaggaggtatacgaacaagtggagggtgagcaaggcaaagaggagctttactgagcaatagaacagcttagaggagacgcacaatgggtagctcctctccacaaccagggtgtaccaatgtgagtgttcagctatcagcagagagtagaccctggagtggatagctcctctccacaggtaggtcatcctgtagagggttcagctctcagcagagaagagaccctggggtgggtagttcctctccgcagctggtttgtcccaccatcttttcaactttcagtatagaggagaccctgggatatgtagctcctctttacagctgatcgtcccgatgtctgctcagctgtcagcagagaggagaccctggagtgggtagctcctctctgcagctggttgtcctgacatcagctcaagtctggctgagtccagtgtttttatgggcttcagaggggagaacgtgcaggctgattggcttatgggtgggcctggcaaaagcaccataagttcccactctggtctgcaggactggcagcctggcccccaggcttcaggccttccctggcttgaaggtggggcttcaccagggacccacccctttctgcccaggaacctgtctgcctgctaccactgtttatggtgcccaggctgttcatgcagaggggcacctgcaggccagtgccaagccacgctcagttcccccctcagcttccctcccatgctcgtcagtgcccaaagttcagtaggggctgaggcagcaaggggctggcatgtcagtgctgtcctgagcatatggacacctggccaggttgtgacagtgcctgggattgacctcagctttgctccaagatcagagcaggtgccgctaatgggttgggggagcttccggggcccctgagagtacagagatgcctgggtccgcagccatggctgggtagctgtagctacacccaggagggtggggctcctgccttcttccagcccctaagagtacagggatgcccaggtctgcatctatggcttaggaaaccgcagctgtgcccaggagggtagggctcctgcctgctcctggcccccaagagcacaggcatacctgggtcagcagccacagcttgggcagctgcagctatgcccaggagggtgaggctcttgccctgccaacttagaagggggaaggacttttctgcctgttcctggctcctgccagctccatggagcgcacagccccagccacgcttcccccactgcagccgagatgggccaccactgccatcagtagtattgcagaatcgcaagttcaggatagatggttacaaaggctggtctttacacttcagcttcatgtttgatctttgaaaaatcttccagtataaagaagaagtcaaatttctaaggaagcacactgaaaactcactttaactcttcacataaaggagggtttgatataagacttttgtattttagatcccatccaagaggatttagtcattttgtaatatcatttaaccttttttttccattttactctaagatacggagacagttagcatttgtggttaagattgtgggttatgaagtcagactgcctggtttcaaattgaagttacatcattaatctctgtatgctttagtttccttatctcaaaaagggagataatagttacttcatacaattattttgggatttaaatcagataatccatgtaaagagcccatgatatgagcacacctcattttattgtccttcacttattgtacttcacagatattttgttttttacaaattgaaggtttatgtcaaccatgctttaaacaagtgtgttagtgctgtttttccaacagcatgtgcttacttcttgtctctgttcacgttttgggattctcacaatatttcacttttttctttgtttttgatggagtcacaccctgttgctcaggttggagtccagtggtgcagtctcagctcactgcaacctccacctcctgggttcaagcaatctcctgtctcagcctcctaagtagctgggattacaggcacataccaccacacccagctaatttttttttgtatttttagtagacatgggttcaccgtgtgggccaagctgatcttgatctcctggcctcaaatgatctgcctacctcggccttctgaagttctgggattacagatgtgagctaccacacccggacaattttttcattgttattgtgtctgttatggtgatctgtgatcagtgatttccttttttatgaaatagagacagggtcttgccatgttgcccaggcaagtctgtcagtgcaatttttccaacagaatgtgctcccttcatgtctctatgtcacatttttgtaattctcacagtatttcagacttttccattatttttatatctgttattgtgaccagcaatctttgatattactattgcaattgttttgaggcaacacaaatcatgctctttataagagagtgaacttaattgatgaatgttatatgtatactgactgctccaccggccatttcccatttctcaccccctcttttggcctcctatctgagactcaacaatgttgaaattagattagtcaataaccctacaatgatctgtaagtgttcaagtgaaaggaagagtcataagtcttttgctttaaatcaaaagctagaaatgatcaaacttcacgagggaggcatgtcaaaagatgagataggcctcttgtgccagtcagtcaagttatgaaacaaaggaaaaagttcctgaaagttattacaagtgctactccaatgaacacacaaataataagaaagcaaaatagacttgttgctgagtggagaaagttttagtggtctgggtagaagatgaaaccagctacaacattcccttaagacaaagtctaatccagagcaagaccctaactcccattctatgaagctgagagaagtgaggaagctgcagaagaaaagttggaaggtagcagaggttggttcatgagttttaaagaaagaagctgtttccataacataaaagtgcaaggtgaagcagcaattgctgatttagaagctgtggcaagttatccagaagatctagttaagatcattgatgaatgtggctacactaaatgacagatcttccatgtagatgaaatagccttctattggtagaagatgccgtctaggactttcaggaatgctagagagatgtcaatgcctggcttgaaagcttcaagggacaggctgactctcctcttaggagttaatgcagctggtgacttgaagttgaagccaatgcttatttaccattctgaaaattctagagcccttaagaattatgctgaatccactctgcctgtgccctataaatgaaacaacaaagcctggatgacaacacatctgtttacagcatggtttactgactattttaagccactgttgagatctactactcaaaaaaaaaagattcctttcaaaatattaccactccttgacaaagcacctggtcagacaagagcttggatggagatgttccagaagattatgttgttttcatgcctgctaacacaacagccattctgctgtccatggatcgaggagtaatttcaactttcaagtcttattattatgagaaatacatttcataagactacagctgccatatatagtaatttctctgagggatcttggcaaagtacattgacaaccttctggaaaggattcaccattccaaatgccattaagaacatgcatgattcatgggaagagatcaaaatatcaacattaacagaaatttgtaagaaattgatttcaaccctcatagatgactttgaggaaggggttcaagacctcagtggaggaaggagctgcagatatggtagaaacagcaggacaactaaaattagaagtggagcctgaagatgtgactgaattgctgcaatctcatgataaaacttaaagagatgaggagttgcttcttaaggatgagcaacagaagtgacttctttatatgcaatctactcctggtgaagatgctatgaatatcgttgaaatgactgaccacgaaggattttagaatattacataaacttagttggtagagcagtggcaggtattgagataattgactccaattttgaaagacattctgttgtgggtgaaatgctatctaacagcatcgcatgctaccaagaaatctttcatgaaaggaagattcagtccattgatatggcaaactgcatctttgtcttattttaagaaatagcggctggctgcgttggctcccacctgtaatcccagcactctgggaggccgaggtgggtggatcacctgcggtcaggagtttgagaccagcctggccaacatggtgaaaccccatctctactaaaaatacaaaaagtagccgggcatgatggtgcccacctgtagtcccagctactagggaaggtaaggcgggaggatcgcttgaacccgggaggcagaggttacagtgagctgagatcataccactgcactccaacctgggcaacagagcaagaccctgtctcaaaaaaaaaaaaagaaagaaagaaaagaaaaaaaggaagaaggaaattgccacagccatgccaaccttccataattacaccctgatcagttagcaccctgattataactaccaccatgatcagtcagcagccatcaacattgatggaggcaagaccctccaccagcaaaaaagattatagcttgccaaaggctcagatgatcattagcattttttaacatataaggtgtatacattgtctttgtgggtgtttttggttttgattttttttttttctttttttgagacagagtctcactctgttgcccaggctggaatgcactggtgctatcttggctcactgcaacctccacctcccaagttcaagcaattctcctgcctcagcctcctgagtagctgggattacaggtgcccgccaccatgcctggctaatttttgtatttttagtagagacagagtttcatcatgttggccaggctggctcgaactcctgacctcaggtgatccacccacctccgcctcccagagtgctgggattacaggcgtgagtcaccgcaccagccatgtacattgttttttagacaattcttttgaacagttaatagactagagtataatgtaaatttatagactttcatctgcactgggaaatcaaaaagtttgtgtggcttactttattgtgatattcacttcattgcagtggtctggaactaaacccacaatatctgtaaggtatgcctgtaatgcctaacataggaaagtctcaacagatgttagctattattattgtataagattgttttatttatgatataagatgtaatcttacactatcatataccataatgagataaaatattcaatttctggggacccttacctctttccctgcaagattttttttattgggatgtcctcaatagaggtggcttaattccacaactagtgaatttagttatccttgcccctttaatatttgcatctcttcatatctagaatcggcacaattataatgagaaatcaagcaaaacatttttttgcataaagagaggaaggcagaatgtgagatggcgttgacatctgtgcctctgccctgggccaaaaagcagagtgggtatttgctgctgattcggcaccccatctgctgccttctctggtggttacatccctcttccctttcccctccgtgtggagccccagggatgatgaagtcagggagagaaggatggaatgtaatgcatcagaggagaaaaacaggacagaggttcagtgaaagacaacggaatgaggagccccattctgcagatgacccagtaggataaatgctgtcttctctgccaatggcagttttacaagtgtttgaaggactgtgtgaaggttaaaaaaacactagcctgttttagtgaatctctgtttttctacttgagagcttttctgacgtctgactcaagaatttactaaacttggtttcattaaactctttttaaacctcttttgtttttttaactcttagctcaggccttcagaataggtcgtttgtttttaccaggagtgctccaacttttgaatacatccgttgtttctcttttcctatagcatataactcactccacttgccaattaatttacaaacctaactcctactaaagcagcttcttattttaaggtaacattgtctacccaatctgagaggtagaaatctgactttctacaacatggtaatcttagaaccactcatttaaagtttaaaatgcaaagcatcgcacactcaaagtctataatgttgtgatttaactctttaattaattttggttaagacctaagtagttaagacctaagcaatagagtgatgagtgccccagaaaggcatggattgagacctaagcaatagagtgatgagtgccccagaaaggcatggattgagtaaacaaaagtaagcaattggaaggaggagctagggagaaattgcttgtttaatggatctcttcatttttaatggaaaattctttaaaaatacttctgctttcaaagcttaaggcttgtttttagcttagactgattgtatttttcagttctggttttctgatgattgttccaactttgtctacaattcaaaggaatgaaattactactgtaatatagagtatttgggggttgtttttcacactgttcagctgctgtgttttattttcacttgactatgaggttattctaacccctcattcagaggaacagttgagtctgattctgccttaagttttcgtgactcttaataattattcattgcatatgtactttcattgagttctttaaaaaaattctctgtgtttgctttctag

SEQ ID NO: 18 - DNA, 335 bp, Homo sapiens
  source 1..335: mol_type = other DNA
gtatgacttctaattttaaaaaggaaaataaattagaatctcttaatgtagaattgctgtcaccttcttctgtagaacttattttcattttaagtggtatcccaaccgtgctagcatgaggagtgaagaacattaaatatattggaataggaaaccccggaattttgtctgaggcaaaaaaccacatctccttttaaatcttaagtagaatgagatgtcctgctcccattttgtgagtactactggaatctgtttttggaatctacaatcttgtgataataaaacacacagttctgtcttcttcaaaacatgcccaaacattcttatgttattag

SEQ ID NO: 19 - DNA, 2089 bp, Homo sapiens
  source 1..2089: mol_type = other DNA
gtatgtaactactatgaattgagttcatttctctgtgaagcacagggcgttctcctaacactgcaggggagatggagtttgtcagacagattacctaattgtttctgatttctgtaatcaggccatgactttcagataagcatactatgtccttatgagttatcccgtccaaatgcgcttgaaggaaaggtggctccagatctgcagcattttagtgtaatcaggcatgagcagttggcctccgccccagagctgggagagccattcgtgttggcagcacactctcagctcctccctccctgtatgcatcatgacttccctgtgattttcaggaagaaattggcagaaggggaactttttaagttttttttcctttacatatagtattttgtttattttttccatcccctcaagcatttatcctttgtgttacatacagtccacttgcactcttttagttatttttaaatgtacaattaaattattattgactatagtcatcctgttatgctatcaagaaggagcattttcaggcctggcatggtggctcacacctgtaatcccagcactttgggaggctgaggcaggaagatcacttgagctcgggagttcgagaccagcctaggcaacatggcaaaacccgtctctaccaaaatacaaaaattagccaggtgtggtggtgtatacctacagtcctagctacccagggggctgagttgagaggatcacctgagcctggggaggttaagcctgcagcgagccatgattgcaccactgcactccagcctgggtgacacagtgagaccctgtctcaaaaaaaataaagggtatttggggggagaagcatgaacttcaccttgtttctgattctgagatcagttaaagcatttgactagcagtttgtaatctgagatttatgggactcatgcatgggcgtgtttatatttgtatgtgtatgttttaagccaatatatagttgtgcttttatatgtagttggtaaggtggattttttttcaccaaggaaattgttattaaaatgagtcagccacatttatagagagaataaagataagaatggtccgttgagtcattctaggctccccacatagtaagccatagtgcacctttgtgtcacaagcctttgtgtcgcaattacatttttaaatgtacaattaaattattattgactatagccatcctgttatgctatcaagaagggacatttttaggcctggcatggtggctcacgcctgtaatccagcattttgggaggctgaggcgggaagatcacttgagctcaggatttttgacaaaatcctatataaagtagccctacaggtagattgaattggtgaaaagttctttttcaggcaaggcacggtgactcacgcctgtaatcccaacactttgggagaccgaggcaggcagatagatcacttgaggtcagaagtttgagaccagcctgaccaaagtggtgaaaccctgtatctactaaaaaatatgaaaattagccggcgtggtggcatgcacctgtaatccgagctactcaggaggctgaggcaggagaatcccttgaacctgggatgctgaggttgcattgagccgagatctcaccactgtactccagcttgggcaacagagtgaaactctgtctcaaaaaaaagttctttttcagtaattatcaacctaaaataagtgcaattctgagacattttagatataaagaggtgtggcaaagagtagggttaatattatttttcaaaacacatacatgtttaagagataagaaaggactgatttcagttctaaaacactgagctatctggtgggtgtggacaaagccgctgaaactatccttaggcattccagagcttggggccgaaaccagctctgaggttgagccattgatagatgtttataaacatcttggccaagaggacacatcagcccaaggagtactagaggtgagatcatgtcattcattctctcctcccacagctggcctcctcagagggaaaccttagctagctgttaacctgatcattaacgtttgctatcacattgattgaaatgtatctttttttaaag

SEQ ID NO: 20 - DNA, 10389 bp, Homo sapiens
  source 1..10389: mol_type = other DNA
gtatagtattatttttctccttttattaattttgtagttgctccctcccctttaactcctagtgtaaaatattggtcacatctagattttactgtaagaggcttggtaacagcttttacctctgaggccctgcatctttcaaatcatcatacatcattaagttgcagtatacaagtgattaattctatagtttaaaaaaaactagtatattttcttgcttattaacattctgatatattacataattaaaaattcaaagctttgtttatggatttgagaatctgtagctgctagttttgacatgtaccatacaacattttagttttataggaggttgggaaagaaaggtaaactccttcctgatgtaaatggtttccctgtgttttgatattctctacacactttgtgcactttctgtgggagacgccctttttctgtggctggcatgccccacccactacatagtttgtgacctttgtcacaaagttgcttcgttaacctgagccattactttctgtatgcagtgaattgactgccaggtagctgccagacaaaccttcctgatttacagcccccaatctccattctcattgaagtctcatccatcagattatttccaaggctgatgcattttccaatgtatgtttttaaattcttcgattcagaaattagaagaacaaattatcaaaatcaggctctctgtactgatttcaaccaatagatttttttctccaaatgttttttctagattgcatagtaccttatacatatgtattgaaatacattgatgtgatttagatcaccattccctccccatcttcctcctgaaataacacctccaaggtacccatacttcattattttgaagcatttcatctcccatcccaccccacccaatctgttaagtccttgtaattctttttccattacctggccaacccatttacaaaggtcaactgctgactattgttctcacagacatacctattcctgcatgaccttcaaccaggacccatcccttaatgcctccaccatagagatagtgcccttaggattcaaagtgttctggggaagattgtatgactccactgacatgcccaactgcaaagtcatgcatgtagcctgaactggaccccagtgttctctgtggtccaactccattccccttattgatttccctccaagttcccaccacctctctcatctgtcagcagatgatctctcctctttattaagaaaattaagatcattgaagctggctgcagtggctcacacctgtaatcccagaactttgggaggctgaggtgggaggatcgctcaagtccaggaatttgaaaccaacctatttgatatagcaagacctcatctctacaaaaaataaacagaattagccaggtgtggtggtagaagcctatagccccagctactctggaagctgagatgggagagttgcttgagcctaggagaggtggaagctgcagtgagccgagatcatgctactacactccagcctgaatgacagagtgagattatctcaaaaaaaaaaaaatcattgagaatgagtaccttcatctttctttctgtgtacttcaatacttgtcttattttctcctgtctcagaggagatgtctctagctccaggagttcctggtaagagttcctggtttgctgtcttggaaaaaaaacttgctactgactctgataaccccaatcagtgctactactctgttcttttcacagcctaatttcttggtataagaagtctttgcaaacctctctttccttgcttttgccccaaccaacagaaatggaaagttacccttcctccgtagttaccactgatgacccagttaccaactccaaaggccctcgtccttcttctttacctcctgctgcttgttattcctctgtctgttcacagccctcagctgggcaatcaaacccttctttacttcccagtactccctgtgtgttagacaagtttatgtgttcccttaggtctctccaccttcacaaatttattcgttctatttcgttcacctaaaatatatgcctccttcatctgtgcatctcaaaaattccagcagtcttaattgaaggtctcactcacataactgcatgttcaagaagtctttgaaattatccaaaaccaaaagtgatctttacatcctttgaacatatgagtggacttggaggagtggaccaagccttccccgtcacctcctcagtgctgccactatgtgaccacatacccagtaccttctctcattaccttttctcttctcttttggagaactgtccccaaaacaaatagaaattaaaaatccaaagataaaaataaaaaatggaaaatagactagtttttaaagaaaaaagacaaaaaaaagtggtcttgagcatggaagaagggcttcaataagcttttactatgtctgcaatatttaatgtaactattaccaagtgaaaaaacatcatattataaaatattttataccatacaatacgaatgttgattttaaagtgtgttttaaaaaaaagtacatcaaaatgtcaatgattatctttggggataagtttatgagtgattattaattttttctgtatttttcctagagcttttccttatttttacatagtacatagattattttagaagccagaaacaatgtttcaaagagaaaaaagtctaactaggtaaaggtacaattatgacgtcttactggcaatcattggtgaggcttcctggcataagtgtacactgcctctcccagccaagcttcgccatcacctcctctgtgcttgcccttatgtgaccatatacccagaaccctctatcattaccttttctcttccagctgtcaaggtagcagccaaattactgatccctgtggttccaaggaacttgcaagtgtaatagaagcaattcctgcattgtcttctctatacttcctcttattctcaggcttcacagtttggcaggcagccatactactcttatttagacaaaggtgctgggttgaacttagagaaagcatcatcccaacaacttggagttaaaacttgtgatgttgaaaacaattttcagtgttactaaaattctggattcagcagtgctgttattattagatgtcttatgccataaggctggtgttaattccttcctttacactttttcctttcctttcaaatgctctgagtatcatggcacttcctgatcctctgctgtcacagcaataatggacctggctccaaaagccaagaagaatcccttggcccctcaccctcacaccctttgcagatactaaaagatgatttttaaacaaacattttgttccctcctacaatatactatttggggttttttgttggtggcggcgggggatgttcttcaaaaaaaaacccacaaatatttgctctaaaataacacttgccttacaaaatacaggtacccagttattaaaaattaatgctttgggacaacaatcctagtctccaaaaaacttagatcattattatagctatgtgtgatgaagagaaaaagaaattcttttgttgtcccaaagcattaatttttggtaactgggtacttgtattttctaatgtgagtgttactttagagcgaacatttattttaaaaagaaaagaggaagaagaactccccccacaaaaacaatgtataccacggaatacagtgcagccaagaaaaagaacaagatctgaacccagaaggcagaggttgcagtgagccaagattgcaccattgcactccagcctgggcaacaagagtgaaactcatctcaaaaaaaaaataaaaagaacaagatcatgtcctttgtagggacatggatggagctggaggccattacctttagcaaactaacacaggaatcaaaaaccaaataccacatgttctcacttaaaagtgggagctaaatgatgcgaacacatggacacgtagaggagaacagcacacactggggccttttggagaaggtgaaagatgggaggaaggagaggatcaggaaaagtaactaatcggtactagctttaatacctggataatgaaataatctgtatggcaaacccatgtgacacaagtttacctatgtaacaaacctgtactcgtaccccgaacgtaaaagttaaaaaaaaaaaaaagaaacagaaaaatacttcttcagaccagtacaccatacattacttattttgtgccacaaccacagagtgttattagccaacactgagaaagatggcattatcttgagttgttccaaactcggtgcatttgctttagtttcacatgtcagtgagtggtggcttcagatacatagacaggataaaaatatgaatttttatgatataaaggaatacttcatttgatctgaagtcatgggaagcagacaaatcaaaatatatcctgcagactttgttgtctcaccctccctaatgtgtgtgtgggtcattttgagaaggtagcgggatggcccttcaaagcgtcagtgccttctattgttagtccccaggcactagagaggctgggagctaagaaaccacatgttgttgatgttattggttatgcaatagagaagactgtgtccaggccttccttctctctgtaacctcctgccatcctacaaaccccagggtctgctctggggaccatttcagatcttggcaagcagaactatagaaagtagcagtagaatattttagggtatagttttcattctgttttgagggcctctatcaaagtataataactgactgcttacctataatagcctaaaactttgctacctctggttttatctgtagttttttaaatattgttcttcatagtaaatagacatcacatcgtaactgtttaattactttgttatatattacctaaagtacttttttctcagtgaacatgaagttgtctcattgtcagacatacttttcacttttctaactgttctgctaaataattatggaatggaactgcttgggattaatgcttttccaggaagctctcaaaggtctttaaggtcaccaaatgtgaattcagaatccagcagctaatcataggttgaaataatgggggcattttaaccaaggccatttctttttataaggcaacttcattgtgggaaaattttctaagaggtaatagacattgtgaattcaaaggcaattatattgttaagctactattatcttcctcctcttttgcatttgaagaaattgctaagctttgtttcttccatcagaggagaagaaatatgaacaagtatcacttctgaaagaaatactgagaaattcaagagagttaagtgtaactatatttcagtctgtaatgccataaggaaggagctacatcttacataaaataatagccacaaaaacatgaagagtcttggttaaacatgacaaagaatcacttgatagagaatctataatataaagctaaggatcccagtgcttgaaacagaatcttaggcccaattcttcctgtaatgtgttgctaaaagagaatatgaaatttcctctccagaaggtttttacaaatggctttaattctcttctctgtctcagctctcctgatgtaccacccaacagctgatttttcttataactgaaccttttctagtagcctcaggtttcgcctgacttgagggacaaaggaaggaattcgaattgatttccaacctacttcttgaatatttacaaggccaggccttctaaatcttgaatcccaaccagctggaagcagttcatcttcctttgggctcttacagcccttctttgtttgctcttagtaccccaataatctgcctggttagttgtctatttctttatcttccctgatagatcataagactcgtgtaaaaggaactattttattcagcgttgggttcccttctctgcttcacaactatttaatttaattaatgttttacatatttgtgcctctttggacctgacggttttctccatccgcttccacttctctacccccccatacatactcctacccagtgtgttttttcctttggatctcctccctccccagaaataaaggtttacccttctatcctcacaaatcagtaaggtttccagaagacctcttctaatcaggcaacaattcctactactattcttgtctccatctctcagtcagcaccagtttttttctctccctcctttgttgttgtcaaagcaattctatttttaatttttgtccattcaagatctccccaccctcacagaaaacaaagggtgtgctcttgggagggagttatggactatggaaggagaggtttcaaagtccagctttagagcaggctggtgagcttgtcaggtgcctgatcgtcatcccccgtccttggctggtcgctctctgccctgatgactgccgctcagtgtaggaaggagacagctctggctgccctccccagagtcatccatgctgggaaggatggaggaggggtggaaagttagtgagagcctgcatgtgctgctgcagagatgcccaagatagcaggagacccaatctgtttcccatttatatattctcattgctgatagatgatggacatccttcatttaggtaattattattgctattaaaatattacctgaaagggtgcatattattgagcaaaatgagtgcctaagtgccttatctctcccacttaatatttctactgaattatgtattctatttcttactaatagagaaaatgaagttccttatgcctttctttagctttattaggagatagaactaattttgaggaagtgctacaccaggaatgcatttgtttccctgaactgtatataagtaactgagctggggcagtgtgaaaggaaagagaggagaggggaggaggaaaggagatgggaggaggagaggtttgttgattaccactctatgccagatattatgctagagagcaaacagaatactgaaatcacctcctccaactgcccagaaactgagtgaggtaggcatattcccatttgacagatgaggaaatcaaggccccaggtcacatagctaaggattgagccaagattcaaacccgggcctgagtctagagttcctgatcttgcttcagaaattgtcactgttagagaagacttgcatagctgccaaaagatacatgctaatcttctaggattaaaaaagccacagaggtggatgacactggttttcctccataggaaagctctagtttttactgtatgcagatcttcctgaaggatgtttctaatatgaaaaattttagcagttgtcttagagcttcttttcttgatttcctcacagttagtttctttataaacaaagtattaatagaacaacttagggcaaagactccctccacctgtggcatatgtctcccagaccacgttctctcacacaaaagagcctggtaccccccgaaacacaaaaattcacttaactatttttttttccctaagaaaagcaagatcctgttaccaaaatgactcttaaactcttctcaaaacttcattgcaaaggaaatgaaactattaaaagaccattgctctgtaattcaggaaattgaatcaacttgtttggagccataggcagaggaagatttgagctgtactgagccacatattgtgagactaaacagtgccctgctctgaaatgattttaccattcatgagctgtctctttataacaccatggagctcctcaaatgcttccttttctttactacctaaaattacagttctctgcacaaaatgaaaatacttttatcagatgttcacatttggagtgattttttaaaactttcatttcaattttccttaatgtttctatacttgtcaaatgcgtatgtctttttaataaataaaagatacatgatacatacatcttgaggctgaagaatttctgcagacgaaatattgatgattgagactggatgataggtttgtgagagctcattatactgttgtctctactattagtatgtattttaagtttttcataataaaatgtttaaaatatttttgtaattctgcagaaaaatttaactcacattgtctgcgttcttcctgtactgctctacccagagagcacagtctttccatgctcctcccactaatttaacactagtcaaattttggcattttgaccaaagaaaggaagggaagggaggtaaattgtggttgggctcaagagccatgatatgctccttcttagcttaattaaaatccatgacaagcacagccatcactcacattttagattctagattgctgctgtagtagtcatgaattgctgcagaacaggcaagaaatgacatgtttttttttgtttgtttgtttgttttcccgaaagctaattgaaggctgggcacagtagctcacacctgtaatcccagcactttgggaggccgaggcaggcagatcacttgaggccaagagttagagaccagcctggccaacatcgcaaaaccccatctttactaaaaacacaaaaaatgagccaggtgtggtggtgtgctcctgtaatctcacttacttggaggctgaggcataagaatcacttgacccctgggaggcagaggttgcagtaagcctaaactgtgccactgcactccaccctgggcgacagaatgagactctgtctcaaaaaaaaaaaaaaaagaaaagagagaaagaaaaggaaaggcagaggcagcggcaggggcaggaatggggggcggaaagggaagggagctaattgaatctagcttcaagccctcgtcgtcaggtttgggaagttcggtatcagtgactgagtgccttctcttaagaaaattgattgaaaacttgtaaataaggcaacaagactgctgtgtacctttttaatatcatactagaacactgtgtagcaaaccttcctaaagactattttatgctctgggccctagacctgtccagtatggtagccacgtgtagctgttgagcgcttgaaatgaggctaagtacaactgaagaactgaattgagatgtaccataagtataaaaaacacgttggattttgagcacttagaacaacagcaacaaaagtctccataatgtgtatattgacacgtgttgaaatgatactattgtagatatagtggtttaaaatagtaaaattaattttacctatttgtttctttaactttaaaaaaatgtggttagtagaaagtttaaagttacatatgtgcttcatattatgtttctgttggacagtgcagccctagagtttctgagaaggtaactttgactagttatttactcctgattagagtccagactgtgaagttacatgttggcctatagatgattaataagctgcaaatgatttctatttatagccaaaaggtaaccccaaaagtttgtgttcttatggccctaggacataaatcattttgtgtctgacttggtagatttcatccatgttttattttccttaaaagtttgactaaatttacctctgatggttgtaccaatcaaaatgttgttatacgacagagctggaaattctctagctcttcttgtactaagtccttttgatcaagtgatataatggatataaatttaagtgttactctgtgaattgtttattatctgtatatttggaattatgcttctgaattgtcttgccttgtttccttaaaaggacagtgaaagggaagtgaaaatattgaacaatgctgatactgaataacaactattttctttcactctatctgcacctgtgtttgtgtaaataaaagtagaggaactgtgacgttttaaaattccagacctccatccccaaagaaaactttccaaaggtcctcattcccagcatcggacccacaaaaatgtcttgccctcccctgcggggcacgtacagcccttcttctctcatccataaggaagagggttctgttgttgttgttttgaatgagcccatcataaaagcagcagaaaccatttgacagtagccatgctactgtttctgagtacccagaaggctatttgtagccttcgtgaacacttgctttctaagccttttgaaatcacgagagatagcatagcaaataggaacctgttgtatattccatttggctatattttgtttgtttgttcatgttgtcagctcactgcttagaatctaaggagacaagaccataataaaggacagtgtagaagacctgaagttttaagctccaaatctcttagctaccaaaataaataaatactacagagctgtttgtgagcaagagaaaacatctagacagagtaaggctaaagtcctttttccttcacccctaccctctcctcttttgcatctagagatttggaaaattgctagaaccatgaattattaggtatgatgttttattttattag

SEQ ID NO: 21 - DNA, 48416 bp, Homo sapiens
  source 1..48416: mol_type = other DNA
gtatagtattatttttctccttttattaattttgtagttgctccctcccctttaactcctagtgtaaaatattggtcacatctagattttactgtaagaggcttggtaacagcttttacctctgaggccctgcatctttcaaatcatcatacatcattaagttgcagtatacaagtgattaattctatagtttaaaaaaaactagtatattttcttgcttattaacattctgatatattacataattaaaaattcaaagctttgtttatggatttgagaatctgtagctgctagttttgacatgtaccatacaacattttagttttataggaggttgggaaagaaaggtaaactccttcctgatgtaaatggtttccctgtgttttgatattctctacacactttgtgcactttctgtgggagacgccctttttctgtggctggcatgccccacccactacatagtttgtgacctttgtcacaaagttgcttcgttaacctgagccattactttctgtatgcagtgaattgactgccaggtagctgccagacaaaccttcctgatttacagcccccaatctccattctcattgaagtctcatccatcagattatttccaaggctgatgcattttccaatgtatgtttttaaattcttcgattcagaaattagaagaacaaattatcaaaatcaggctctctgtactgatttcaaccaatagatttttttctccaaatgttttttctagattgcatagtaccttatacatatgtattgaaatacattgatgtgatttagatcaccattccctccccatcttcctcctgaaataacacctccaaggtacccatacttcattattttgaagcatttcatctcccatcccaccccacccaatctgttaagtccttgtaattctttttccattacctggccaacccatttacaaaggtcaactgctgactattgttctcacagacatacctattcctgcatgaccttcaaccaggacccatcccttaatgcctccaccatagagatagtgcccttaggattcaaagtgttctggggaagattgtatgactccactgacatgcccaactgcaaagtcatgcatgtagcctgaactggaccccagtgttctctgtggtccaactccattccccttattgatttccctccaagttcccaccacctctctcatctgtcagcagatgatctctcctctttattaagaaaattaagatcattgaagctggctgcagtggctcacacctgtaatcccagaactttgggaggctgaggtgggaggatcgctcaagtccaggaatttgaaaccaacctatttgatatagcaagacctcatctctacaaaaaataaacagaattagccaggtgtggtggtagaagcctatagccccagctactctggaagctgagatgggagagttgcttgagcctaggagaggtggaagctgcagtgagccgagatcatgctactacactccagcctgaatgacagagtgagattatctcaaaaaaaaaaaaatcattgagaatgagtaccttcatctttctttctgtgtacttcaatacttgtcttattttctcctgtctcagaggagatgtctctagctccaggagttcctggtaagagttcctggtttgctgtcttggaaaaaaaacttgctactgactctgataaccccaatcagtgctactactctgttcttttcacagcctaatttcttggtataagaagtctttgcaaacctctctttccttgcttttgccccaaccaacagaaatggaaagttacccttcctccgtagttaccactgatgacccagttaccaactccaaaggccctcgtccttcttctttacctcctgctgcttgttattcctctgtctgttcacagccctcagctgggcaatcaaacccttctttacttcccagtactccctgtgtgttagacaagtttatgtgttcccttaggtctctccaccttcacaaatttattcgttctatttcgttcacctaaaatatatgcctccttcatctgtgcatctcaaaaattccagcagtcttaattgaaggtctcactcacataactgcatgttcaagaagtctttgaaattatccaaaaccaaaagtgatctttacatcctttgaacatatgagtggacttggaggagtggaccaagccttccccgtcacctcctcagtgctgccactatgtgaccacatacccagtaccttctctcattaccttttctcttctcttttggagaactgtccccaaaacaaatagaaattaaaaatccaaagataaaaataaaaaatggaaaatagactagtttttaaagaaaaaagacaaaaaaaagtggtcttgagcatggaagaagggcttcaataagcttttactatgtctgcaatatttaatgtaactattaccaagtgaaaaaacatcatattataaaatattttataccatacaatacgaatgttgattttaaagtgtgttttaaaaaaaagtacatcaaaatgtcaatgattatctttggggataagtttatgagtgattattaattttttctgtatttttcctagagcttttccttatttttacatagtacatagattattttagaagccagaaacaatgtttcaaagagaaaaaagtctaactaggtaaaggtacaattatgacgtcttactggcaatcattggtgaggcttcctggcataagtgtacactgcctctcccagccaagcttcgccatcacctcctctgtgcttgcccttatgtgaccatatacccagaaccctctatcattaccttttctcttccagctgtcaaggtagcagccaaattactgatccctgtggttccaaggaacttgcaagtgtaatagaagcaattcctgcattgtcttctctatacttcctcttattctcaggcttcacagtttggcaggcagccatactactcttatttagacaaaggtgctgggttgaacttagagaaagcatcatcccaacaacttggagttaaaacttgtgatgttgaaaacaattttcagtgttactaaaattctggattcagcagtgctgttattattagatgtcttatgccataaggctggtgttaattccttcctttacactttttcctttcctttcaaatgctctgagtatcatggcacttcctgatcctctgctgtcacagcaataatggacctggctccaaaagccaagaagaatcccttggcccctcaccctcacaccctttgcagatactaaaagatgatttttaaacaaacattttgttccctcctacaatatactatttggggttttttgttggtggcggcgggggatgttcttcaaaaaaaaacccacaaatatttgctctaaaataacacttgccttacaaaatacaggtacccagttattaaaaattaatgctttgggacaacaatcctagtctccaaaaaacttagatcattattatagctatgtgtgatgaagagaaaaagaaattcttttgttgtcccaaagcattaatttttggtaactgggtacttgtattttctaatgtgagtgttactttagagcgaacatttattttaaaaagaaaagaggaagaagaactccccccacaaaaacaatgtataccacggaatacagtgcagccaagaaaaagaacaagatctgaacccagaaggcagaggttgcagtgagccaagattgcaccattgcactccagcctgggcaacaagagtgaaactcatctcaaaaaaaaaataaaaagaacaagatcatgtcctttgtagggacatggatggagctggaggccattacctttagcaaactaacacaggaatcaaaaaccaaataccacatgttctcacttaaaagtgggagctaaatgatgcgaacacatggacacgtagaggagaacagcacacactggggccttttggagaaggtgaaagatgggaggaaggagaggatcaggaaaagtaactaatcggtactagctttaatacctggataatgaaataatctgtatggcaaacccatgtgacacaagtttacctatgtaacaaacctgtactcgtaccccgaacgtaaaagttaaaaaaaaaaaaaagaaacagaaaaatacttcttcagaccagtacaccatacattacttattttgtgccacaaccacagagtgttattagccaacactgagaaagatggcattatcttgagttgttccaaactcggtgcatttgctttagtttcacatgtcagtgagtggtggcttcagatacatagacaggataaaaatatgaatttttatgatataaaggaatacttcatttgatctgaagtcatgggaagcagacaaatcaaaatatatcctgcagactttgttgtctcaccctccctaatgtgtgtgtgggtcattttgagaaggtagcgggatggcccttcaaagcgtcagtgccttctattgttagtccccaggcactagagaggctgggagctaagaaaccacatgttgttgatgttattggttatgcaatagagaagactgtgtccaggccttccttctctctgtaacctcctgccatcctacaaaccccagggtctgctctggggaccatttcagatcttggcaagcagaactatagaaagtagcagtagaatattttagggtatagttttcattctgttttgagggcctctatcaaagtataataactgactgcttacctataatagcctaaaactttgctacctctggttttatctgtagttttttaaatattgttcttcatagtaaatagacatcacatcgtaactgtttaattactttgttatatattacctaaagtacttttttctcagtgaacatgaagttgtctcattgtcagacatacttttcacttttctaactgttctgctaaataattatggaatggaactgcttgggattaatgcttttccaggaagctctcaaaggtctttaaggtcaccaaatgtgaattcagaatccagcagctaatcataggttgaaataatgggggcattttaaccaaggccatttctttttataaggcaacttcattgtgggaaaattttctaagaggtaatagacattgtgaattcaaaggcaattatattgttaagctactattatcttcctcctcttttgcatttgaagaaattgctaagctttgtttcttccatcagaggagaagaaatatgaacaagtatcacttctgaaagaaatactgagaaattcaagagagttaagtgtaactatatttcagtctgtaatgccataaggaaggagctacatcttacataaaataatagccacaaaaacatgaagagtcttggttaaacatgacaaagaatcacttgatagagaatctataatataaagctaaggatcccagtgcttgaaacagaatcttaggcccaattcttcctgtaatgtgttgctaaaagagaatatgaaatttcctctccagaaggtttttacaaatggctttaattctcttctctgtctcagctctcctgatgtaccacccaacagctgatttttcttataactgaaccttttctagtagcctcaggtttcgcctgacttgagggacaaaggaaggaattcgaattgatttccaacctacttcttgaatatttacaaggccaggccttctaaatcttgaatcccaaccagctggaagcagttcatcttcctttgggctcttacagcccttctttgtttgctcttagtaccccaataatctgcctggttagttgtctatttctttatcttccctgatagatcataagactcgtgtaaaaggaactattttattcagcgttgggttcccttctctgcttcacaactatttaatttaattaatgttttacatatttgtgcctctttggacctgacggttttctccatccgcttccacttctctacccccccatacatactcctacccagtgtgttttttcctttggatctcctccctccccagaaataaaggtttacccttctatcctcacaaatcagtaaggtttccagaagacctcttctaatcaggcaacaattcctactactattcttgtctccatctctcagtcagcaccagtttttttctctccctcctttgttgttgtcaaagcaattctatttttaatttttgtccattcaagatctccccaccctcacagaaaacaaagggtgtgctcttgggagggagttatggactatggaaggagaggtttcaaagtccagctttagagcaggctggtgagcttgtcaggtgcctgatcgtcatcccccgtccttggctggtcgctctctgccctgatgactgccgctcagtgtaggaaggagacagctctggctgccctccccagagtcatccatgctgggaaggatggaggaggggtggaaagttagtgagagcctgcatgtgctgctgcagagatgcccaagatagcaggagacccaatctgtttcccatttatatattctcattgctgatagatgatggacatccttcatttaggtaattattattgctattaaaatattacctgaaagggtgcatattattgagcaaaatgagtgcctaagtgccttatctctcccacttaatatttctactgaattatgtattctatttcttactaatagagaaaatgaagttccttatgcctttctttagctttattaggagatagaactaattttgaggaagtgctacaccaggaatgcatttgtttccctgaactgtatataagtaactgagctggggcagtgtgaaaggaaagagaggagaggggaggaggaaaggagatgggaggaggagaggtttgttgattaccactctatgccagatattatgctagagagcaaacagaatactgaaatcacctcctccaactgcccagaaactgagtgaggtaggcatattcccatttgacagatgaggaaatcaaggccccaggtcacatagctaaggattgagccaagattcaaacccgggcctgagtctagagttcctgatcttgcttcagaaattgtcactgttagagaagacttgcatagctgccaaaagatacatgctaatcttctaggattaaaaaagccacagaggtggatgacactggttttcctccataggaaagctctagtttttactgtatgcagatcttcctgaaggatgtttctaatatgaaaaattttagcagttgtcttagagcttcttttcttgatttcctcacagttagtttctttataaacaaagtattaatagaacaacttagggcaaagactccctccacctgtggcatatgtctcccagaccacgttctctcacacaaaagagcctggtaccccccgaaacacaaaaattcacttaactatttttttttccctaagaaaagcaagatcctgttaccaaaatgactcttaaactcttctcaaaacttcattgcaaaggaaatgaaactattaaaagaccattgctctgtaattcaggaaattgaatcaacttgtttggagccataggcagaggaagatttgagctgtactgagccacatattgtgagactaaacagtgccctgctctgaaatgattttaccattcatgagctgtctctttataacaccatggagctcctcaaatgcttccttttctttactacctaaaattacagttctctgcacaaaatgaaaatacttttatcagatgttcacatttggagtgattttttaaaactttcatttcaattttccttaatgtttctatacttgtcaaatgcgtatgtctttttaataaataaaagatacatgatacatacatcttgaggctgaagaatttctgcagacgaaatattgatgattgagactggatgataggtttgtgagagctcattatactgttgtctctactattagtatgtattttaagtttttcataataaaatgtttaaaatatttttgtaattctgcagaaaaatttaactcacattgtctgcgttcttcctgtactgctctacccagagagcacagtctttccatgctcctcccactaatttaacactagtcaaattttggcattttgaccaaagaaaggaagggaagggaggtaaattgtggttgggctcaagagccatgatatgctccttcttagcttaattaaaatccatgacaagcacagccatcactcacattttagattctagattgctgctgtagtagtcatgaattgctgcagaacaggcaagaaatgacatgtttttttttgtttgtttgtttgttttcccgaaagctaattgaaggctgggcacagtagctcacacctgtaatcccagcactttgggaggccgaggcaggcagatcacttgaggccaagagttagagaccagcctggccaacatcgcaaaaccccatctttactaaaaacacaaaaaatgagccaggtgtggtggtgtgctcctgtaatctcacttacttggaggctgaggcataagaatcacttgacccctgggaggcagaggttgcagtaagcctaaactgtgccactgcactccaccctgggcgacagaatgagactctgtctcaaaaaaaaaaaaaaaagaaaagagagaaagaaaaggaaaggcagaggcagcggcaggggcaggaatggggggcggaaagggaagggagctaattgaatctagcttcaagccctcgtcgtcaggtttgggaagttcggtatcagtgactgagtgccttctcttaagaaaattgattgaaaacttgtaaataaggcaacaagactgctgtgtacctttttaatatcatactagaacactgtgtagcaaaccttcctaaagactattttatgctctgggccctagacctgtccagtatggtagccacgtgtagctgttgagcgcttgaaatgaggctaagtacaactgaagaactgaattgagatgtaccataagtataaaaaacacgttggattttgagcacttagaacaacagcaacaaaagtctccataatgtgtatattgacacgtgttgaaatgatactattgtagatatagtggtttaaaatagtaaaattaattttacctatttgtttctttaactttaaaaaaatgtggttagtagaaagtttaaagttacatatgtgcttcatattatgtttctgttggacagtgcagccctagagtttctgagaaggtaactttgactagttatttactcctgattagagtccagactgtgaagttacatgttggcctatagatgattaataagctgcaaatgatttctatttatagccaaaaggtaaccccaaaagtttgtgttcttatggccctaggacataaatcattttgtgtctgacttggtagatttcatccatgttttattttccttaaaagtttgactaaatttacctctgatggttgtaccaatcaaaatgttgttatacgacagagctggaaattctctagctcttcttgtactaagtccttttgatcaagtgatataatggatataaatttaagtgttactctgtgaattgtttattatctgtatatttggaattatgcttctgaattgtcttgccttgtttccttaaaaggacagtgaaagggaagtgaaaatattgaacaatgctgatactgaataacaactattttctttcactctatctgcacctgtgtttgtgtaaataaaagtagaggaactgtgacgttttaaaattccagacctccatccccaaagaaaactttccaaaggtcctcattcccagcatcggacccacaaaaatgtcttgccctcccctgcggggcacgtacagcccttcttctctcatccataaggaagagggttctgttgttgttgttttgaatgagcccatcataaaagcagcagaaaccatttgacagtagccatgctactgtttctgagtacccagaaggctatttgtagccttcgtgaacacttgctttctaagccttttgaaatcacgagagatagcatagcaaataggaacctgttgtatattccatttggctatattttgtttgtttgttcatgttgtcagctcactgcttagaatctaaggagacaagaccataataaaggacagtgtagaagacctgaagttttaagctccaaatctcttagctaccaaaataaataaatactacagagctgtttgtgagcaagagaaaacatctagacagagtaaggctaaagtcctttttccttcacccctaccctctcctcttttgcatctagagatttggaaaattgctagaaccatgaattattaggtatgatgttttattttattaggttggaatgaaatacagaaacctaatcctgaaacctgggggatctctggacggcatggacatgctccacaatttcttgaaacgtgagccaaaccaaaaagcgttcctaatgagtagaggcctgcatgctccgtgaactggggatctttggtagccgtccatgtctggaggacaagtcgacatcaccatgtgttactggcctggaaactgaagggagttttgcaagtgaaaatttagatttctattgacatccttttgttttctaattttaaaaattataaagatgtaaatggaattataaatactgtgacctaagaaaagacccactagaaagtaattgtactataaaatttcataaaactggatttgatttctttttatgaaagtttcatatgaatgtaacttgattttttactattataatctagataatatgatataagagggctaagaatttttaaattgaatcatatatatgatataatttgatccttcttgtatcttgaagttttgtacttgggatttctggactgataaatgaatcatcacattcttctggtaaatattttcttggagctctgtgtcaactttgatcctttgtctcccaggaaggtgtgacctctcctttgcctgcatacctcaaggccaggggaatatgcctcagtgatgcatttatctttgtatatcaggccgcatgattcccaactttctgccacacttaaattacgttcctccatttcagttttgtcttttctgtctaaagttcagtcaaagagtatcaaaaaattatgtttcagctagactggtgtaatgtataagtttttgtatcttgtattagaggatttcgtagcttttattagaggctcatttccacctcagcatacaagatcgttagtcttttggcatgtgtgccaattagaatactaaagcaagtccaagcacatttttctcttctcacgtttctaataagtgttagggactttgcctcttttacttaccacgtccccaaaagtgtcaggtagacatgtcacaaatggctctgtagagagccatgggaagagagaggaggtggatgtggaacataaagggttcagaaactccagaagaggagtgggttttggatagaagcatttgaggacagctgctccaaagccttatgtgtatgatgaaacttaaccacggggaagagactcttcagtagcctgttctgtctggtgatttttattttaagtgaacctttggatctatctttaactctctttattgtgagtctaaattccaattctgcagcagatcagtaaactcacagtatttttcctgtggaaatctattcaataaggaaaccaagacaggataataaaatttaaaaaaaaaacaactttgaattcccctgcctaggtcttccagttgttttccagcgcatacctcaggtatgactttgctagccggggacaaaattagcaccttccgattctctagtccaaatgaactttgtgctaaataaaaaattattatactacataataaagttacagatagcaggaaatgcaagagctaggagattcctagattatatctgccaagcaaataccttaaacatccacctgaaatcctactaccccctcttctgagataatttgcccagcccttctcttcccacacactcactcaatgtcacccccttctaatccccaaaactgtttttgtggtctttgtagcctatagtagttttctcacatctttccccctagacttttctgtttttcagtttcagacaaaaaaactcttcagctttttccagtgtgtctccttaacagtaactttaccacttgaaatcttatttcatagaaaaactaaattggtgtggaaaggctgcacacaataaagttatattattatccatgaaaatgaactcatatttctttcatactttaacgttaaaaccgaaatgcatgagagcaaaagcaccatggtgttctttctatttagggcctacctctaatatttaaaatctaccaaagagcagtcacaaaattaaaactcagcccgggcgcagtggctcatgcctgtaatcccagcactttgggaggccaaggcaggaggatcacctgaggtcagagttcaagaccagcatggtcaacatggtgaaaccctgtctctacaaaaatacaaaaagctgggcatgatgttgggttcctgtagtcccagctacttaggaggctgaggcaggagaatagcttgaacccgggaggtggaggttgcagtgagctgagatcatgccattgcactccagcctggacgacagagtgagattcagtctcaaaaaaaattaatactcaaagaattatctagcataatttaaaagaaaggactttttaaaaattctctagcataattcaaaagaaaggacttaacttttttttttttagtgtggtcatccgtctagttgttctttttttccagatcagagcagagaatatcactgacatgcttgaaatggtggataactatgtaaattgtaattggacaaatgtacactttagatttatggactgagccacatataataaggtctctcctggtaattgatccaggggatttaggcctctttcgggttttttgttttttttttaggcattgttatgttgtgaaggataaaatcttcaacatcttatgcaaatggatagtaggcatgatcctaaaggtttagttttacgatgctgcagagaagagaaatgtcttgacgttttgccacctgatgtagactttgtccccctctagtataaatgttgcatgttacctagataaacaactaaaaattgccttgagttatcacctgagctacttatgccaaggtcttgcctttctaaagctaataaggtgagaggtggatatctgtagctcttcggatgaaaaattgcattgtgggagataccaaaattgaggaaatagctcttcaaagaaaaattactgatatgatcattgtacttgtaaatgccttaagtagcaggcagtgactcaattttctactttaccattttacctttagcttttatgtatgaattataggtctgtggagattctgcctccccactaggccagtgtgtgtttaccatttattcattttctatcatacacaggtggattaaaatttacattaaaatttacattaaaataccatcatacttcaggcttctataacaaaatatcagactgggtggcttcaaaagcagacatttcttacagttctggaagctgggaagtcccacaatccacatgctggtaaatttggttcgtggtgaggcccctcttcctcttttactgaccacatccccaaaagtgtcaggtagacatgttacaaatagctctgtagagagccatgggaagagacaggaggcagatgtggaacataaagggtttagaaacttctgcaggcagcagtggcagggagcaagccctagagtgtctctttttacgagagcaggaatcccatcatgagagttccttcctcatgactttatctaaacccagtcacccccaacaaaggccccaccccctaaccccatcacattggctgttacggcttcaatgtaggggatggggcacaaacattcagtccataacgaatactgattcctcaaatagggtttaaacatagttaactgagcccccaaagaatgttaaaagagaaaatccattttatttgaatagatgcagtgaccacagcttcttccctcaaatcaacacattacagttagatgtctcccatctgaaattggatagcccactgaaattgaacatgccttctcttataaatgtgtggtgagaataaaagcaacaaagaaatgaatgtggtggctcacacctgtaatcctaacactttggaaggttgaggcaggaggatcctttgtgctcaagagtttgagaccagcctgagcaacacagtgagaccctgtctctacaaaaactaaaaaaattagctagggatggtggcacatgcctgtagtcccagctacttgggaggctgaggtgggaggattgcttgagcccaagaaggtcaaggctgccatgagccataatcacgccactgcactccagcctgggtgacagagaccctgtcttaaaataaaataaaaaaaaaaggaaaaggaaagacatacataccctcagttcttcgaaaaacagtcaacgtccaaaaagtttattttttgagtcacctttaatagagaaatttcccactggaaacagatccacctaagtgattatctagtatcagctgtatcaaggcaaaaggtaaaggttataagatgtaaatattagaccaaaatagccttttttaacaaacacaataatgctgtacgtctgtaacaaaacaaaatttgaaaaattgaggtaatgtacacagcgatgcacacacccccacaccacaccgtgattcctgagttttgatttggttgaattcaccttgtagttccctttcctgagaaaatacaggttcaacacatctagtccacgatgtacgtacaaggggaaggggtgaacaggaaatagactcccttattctgctcacatgagctggaacctgtactagctgcatatttcatagaccccagaggctcacctcaattgtactcctatgataaaatgtctctagcatttgtcatgagagaaactggctagaaatagtttgttcattgcgtccagcaagacacgcattgctgttgatatctttgtggctaagatggagaatgtgactggataatagttatccaggtggattactagctattgaaacagtctgagatagttgcatgatgattaacgttaaactgggagtaatttcaagtcatttggctaaaaatgaaaaaaaagtcccataaaaaggtatcaaatgtacagataatagggctggaattattaagtatgatgatgttattaacatctaaaattattttggccgggcaaggtgggtcacgcctgtaatctcagcactttgggatgccaagatgggtggatcacctgagttcaggagttcaagaccagcttggccaacatggcgaaacccgtctctactaaagaatacaaaaattagccaggtgttgtggcacatgcctgtactcccagctactcaggaggctgaggcagaagaatcatttgaaccccggaggtggaggttgcagtgagccgacattgtgccgcttcattccagcctgggcaacagagtgaaactcttgtctcaaaagtaaaaaaataataatgtttaaaaatatttcaatgtggagacaagctcaaaatgaaattagacacattccattacccaggtaaaagaaggggaagcctgacttgatagtagtattcaggaaaaaagagttggcagttttatttggccaaattccaatatcagctcatggtacagcacaccgggggagggggacgggaggcgagaactaaggctttttaagaatgtgttgatggaagtatgtgcctagatcaaaagaataatccccccggactccagtgtaagatcaattactgttggaatattgtgttcctttctagatatcacattttaagcagactttggccaagtagtacagtgtttgcaggagcagtaacaagatggtgataactttgaaaatacttctcaaaagaaaaataaaaaagaattagggaagttcagtctggagataattcagaaatacagatgataattgttttcaaattcttgaaggaaatgggagagagaataggctaattctgtattgcttcagaaaccaaatggaaacaattaaattccattagagaaacggttggaaaatatgaggaggatttagttcagtacgaggaagctgtttctaatactttttgttggttaaaaatacattccgctgctgtggaaagcctgtagctgccaggagtgttacagagggcattcctcccttgagttgacatttgtgccaaaccggcttttagggcttctccagcttttaagatgcgataatgataagatgatcatcgggaaaacatccctcagatgaaacgttcacaggctggctctgaaaactggcattcagatgattgcggctcccccatactgtaggaatattgtttatggcttaaggttgcctcgctcctcatctgtaatcagtgaaagtttatccagaggttaattaccggttttctggtgggtatctgggaactgaggatgggagattaactgttgtatatgaccatagtaaagcaaaagactgttagagaatgagtaaacgttcgttttcctccctacagaatttacagttactctctgtccattccactcactactgtcttcatcacacacacagaggcaaacgtctgattcagatagccaggtgtgccatgcatgcactccaccatattgtgatctcttcgaggcttgtttctgtcccctgtcctccacagtcctggattgttaatgaatagttcatacatgtttgttaaataaatataccttctttaaaattatcttttgttataaagatgcctttttctatggtaactgcaaaatacctaatttgtaactaaacctaaaactatgtggataagttatttctacacctgcggggggcagatttctacatgagagtcctttcttagtgtactgagagtttctgcatgaggtaaatgaaagaaacatgttttttgtaaaaaaaaaaaaaaagaaaagaaaaaaattggcaatggagaacgtttctaaagcttctcagcttctccctatgattatgtattgaaacctcggaatttgttcatctggttttcttggggggtctatgaaaagggcagagcaagcagatgtcccatgattgccctgaaattatattagatatgttcgtgtgcatggatacctgcatttttctagggatagagtccttagctttaatcagaagaaattaagaactactgtctttaaaaatgtgctttcaaacatttgttttttgaattcatttcaaagactctaacgtgcccattatgtgtcaggcgctgtgcttggcaatgaggatacaaaaagacaccccagaactggagctgctcacagtggagtggagaaggcaaatgagttcataatttattgggataaattataatagaaaggcatgtatccaaaacttttctgtgttttcccctcaaccctggttgactccactatacaatttgactgtggtgccacaaaattttacatagttaccacgccacctgccaccgcaggcttctatttttaacaaaataattgcttttctcttttcagcatttcaggagtgggaccaaatggtgttctatatctggtatatccaggagtttcttagatctggtagttaaagggcttataaaaaagagatgaaaatgttcactttgccacttttgtgcaagtggttataaattgacagccattagaagaatgatgtgggaccccttttaagctgatatgtattagatagccaagaggcattggtacatcctataagtctagaaaacaggttgttaaaataatcactgagttgtttagagatggtccagattagtcaagatttcttacttcctgttcccagcaactttttttttgagatgagatcttcccatgttgcccgggctggtctggaattattgggctcaagagattctcccacctcagcctcccaaagtgctgggattactggtgtgagccactgtgcgcggccccatcagtgttaataatttccattaccaccagtaagagccaaaaaaagcaccctagcatttcaacctcttactgcctatttgtgacttctttatgtagggatagaaactgactaaacagatcaatggaagactaaagaagcctcagggctccaaggttcagacaaagactggggctggactttaaacttacactccattcccttctgtttctttaaataatcatctgcttctcagaaatccttgttttagtctatcagacctatatattttattttcttgtcttttacttattcatgtaattatttaaatttttgatgagataatacatttgatgagagaaagtggtaggagtgattccagacaggaattttctttctcttttaatgattggatggataggtcttaaaaggaatgtaagactttattccagaacaaagcagtcatcagtccctttgtattcagggcaaagtggggaaaaccaaaagatacattttgtcctccctgttccaaatcagatgcctttctatggtcttcaacatttgtgtgactgacaagtgggacttctgttgtaattcacaatgcaatcactgttctcaacatgcacatggcccactctgtctcagcttcaattataaaatcttcagccagaggctattatcctctgttttgttcagtcagcgagatagccagtgaatttccaactgagatcaggtggcaggagaaaaatttctcacacttcatctatcaagccgttatagaccccagtatatttcctccactggggggtcctgatagggaagtttttctgaagtcatttgggaaggtgtcctaacattgcatttccattcctaattccaccttaggtgagggcagggaaataatagcttaagaaaccgtaaattcacagagctccatcctcctgtttcattattttcatgtcactaatttttcagtagataagctacatcctgtggtctacccagccatgtgaagcatttctttctctcctgcccacccttcctttctccccaaagtccaattaaataaatgaaagattctgggcaaatctctccaaatcccagcaggaacacaacagaagtctgaggcaaaaaacatagttagtgaggccatggacaacaaatctaggtgctttttaatttgggagtgggggattggaggcttttctgtgaaacaccctagttttaaattacagtcagtgtcccagtgcctgccagctaaatgagaggtttggaaggattagggtaagagtagactatatataaccacttctacaagtaaatgccttttaatttttttctaacataaatattgcaggaagagtaaatgccttttttaaatgtctgtgcaagctaggcacggtggtgcattcctatagtcctagctcttcagaaggcttgaggcagggggatcgcttgatcccaggaatcagaggctgtaatgagctatgactgtgccactgcactccagcctgggtgacagagtgagacattgtctcttaaaaaaaaaaaaaaaaaaaggtggggccgcgcatggtggctcaggtctgtaatcccagcactttgggaggctgaggtgaggggatggcttgagcccaggagttcaagaacagcctgggcaacatagtgaggccccttctctgcaaaatttttttttaaattagcctgctgtggtggcacacacctgtggttccagctactcaggaggctaaggtgggaggatactttgagcctgggaagtccagactgcagtgagctgtgattgcaccactgcactccagcctgggtgacagagtgaagtcttgtctcaaaaaatgaatgaatgaatgaatgaatgaatgaatgaatgtctgcagaatccagaagagctctatggaagatttggcatctttgaaaactcattgaccaaattttaagtataattatgaacttgttccaggaaagccaaactactatctggttgacttttatcttctgaagttcaagttaatggggaggtgggggaaaagccagttaaagtcaacttgtcttataagggtggtgagtatttgtgttaaggcatacaaaaacctgattaattcctctgtctacctagtaagtttcttaataccctatcagaattcagctggagcactagtagagcaacacactgttttctcttgtgccagtagacaaaatgtcagaacgcctgctgcattcctctgggataatagaaatgaagtcattacgttagaaagtggatcatgtgcccaggatacacttctctcaccctgaacccagtgactctttcctgggttaaagttactgatctggtggcagatgcagttctggtagccagaagagggtgagacagaagagccacttaaggaacattgaggttttatgatatttgaaatggcaatgacagattggtgtggtggctgaagtacagatgtgcctatcagaaggtgaacaccaagagggaagtgttaggacagagagccaagaacttgattgctggcaagtgctggcttgaacaagggcaattgctggaatctaagaggggtgctaatattcaagagaagaaggtgtccagtttcagggctctccttgattagcaaacaattgttttgtaattcaaggtgactagaagttttacttttcaaaggtactgtaagagactgtctaacctcctccaaaggattttcaggacttgttaaccatgaataataaaaggtatgagttcatggccaggtgcggcagctcacacctgtaatcctagctctttgggaggctgaggcaggtggatcacttctgcccaggagttcgagaccagcctaggcaatatggtgaaaccttggctctactaaaaatacgagaattagccaagtgtggtggcacgtgcctgtagtcccagctacttgggaggctgaggtgggaggatcacctgggcttgggaggtcaaggctataataaggcaagattgtagcactgcactccagcctgggccatgacagtaagaccctgtctcaaaaaaaaaaaaaaaacaaaataaaataaaaggtatcagttcaaacaaaactccttaaaactactttattacctcttatgtataaaaacttttgtagtcatgttttaatggaatattaccaaagttgacctttattgtgcctgtcagaaaaatctggctgttatcttgggttcctaaaggaagaagtaataggagctgtttggcagacttgacaacagtttctaacatttctaaacagtctaatcaataatcaaaaggacaggcagggcttggcgactcacgcctgtaatcccagcacttttgtaggctgagatgggctgatcacttgagctcaggagtttgagaccagcctgggcaacatggtgaaacccctgtctctgcgtaatacacaaaaattagctgggcatggtggtgcatgcctgtagtcccagccacttgagcctgggagatagaggctgcagtgagcgatgatggcaccactgctgtccaggcttagcgagagagtgagaccctgtctcaaaaacaaaaagacaaaacaaaacaaaaaccacagaaggacaaattgtttggctcaaccctctagaaaccataacaatataaataactctccccagtgaattgtttctgtcttaaatcttggaaataatcatttttatcgtgatttttatcatttttatcttgaatatttgtttccacaaatctcaccctcttcctccatcctcttatacacattctcacaccacgttctttaagcaaagaaaatatactttcaagctaagtgtttcttttgatgctaagacacttaaaaaataacagtggggaaagcaaaagaaataaatgcttattcctttcccatctggattttacaaagcaaactggaggagaaaacaatacaagctcagtcagtatgcattttatttcctcctgccgctctctcactctgcttgggattaaatgttcccttagtcctcaaccaaaatggcaatatgatctcatgtttgtttattgtgttgtctttgtatttcctaggtcaacagggtgcaaattttgatttactgatgtagcttctctccccaaacacagagaaattcttcagggagcttgctgtaagcatatccaagtgcagctgaatctcacaggtagacattatataaaaatagagtaacactttaagatgcaaaagtggcatcattcagtagtgccatctctgcactccaggtgcaagtccaaggattctaccaaacagggttgccaaatactaattaaactaattggttatcaatgctgttcttaaatgttatgatcctggggtttctacaatgagaagaaaaggggatgctttccattccccatacaaaacgcataaattctattatgtactctcaaatcagcaagaaattaccaagaaaaaaattatcttgtctgaaataacaatttggagagaaaatgaccagtatctgtatatgtgtatttatttccttttatcttgtcatttctctatgtccaatacataataaactttaaaaaacaggctaacatatcaagatgaagagattcattatagccactatgattttctatgataaaagaaaaaaattttttcaatacactaaaatgggataagctcaacagactagagagtttcaaatgcataggaaaaggaaataaaaagagataaaagaaattataatacttctgaaaccagcaatgtgattctgcttcacactcatgcaactggcagcaatctagctactaaggctgaagatgagcacacccagtagttccactccaagatatggaccgccaaacaaacttctacatggacaccatgagatatctactacaatgttcacagtagctttgtttacaatggcaaagcattgaaaaccaccaaagcatctatcagcagaagagtggataatgtttatttgaacaatgggctgtattgtaattaggataagggaactaaagctccatgtatcaatgtagatacaactcaagagcagtgttacaatgccattgcagaagggttcgttcagattgccctttatttaagttaaaaatatatatgtaatatatatattcaaaataatgatgtatctttggtggagctatacatactagtataaaaacatccacatgaaaatggataataaattcaaggcttcctctgatgagggagaaaggagaataggattcagaagagatatacaaggagctgaaactacaactacaataaatgtttttatttaaaaacccaatgcaaggccaggtgcggtggctcatgcctgtaatcccagcagttttgggaggccaaggcaggcagatcacttgaggtcaggagttctagaccagactggccaacatggtgaaaccccatctctactaaaagtccaaaacttagccatgtgtggtagcgggtgcctgtaatcccagctactccagcacgagaatagctggaacctaggaggtggaggttgcagtgagtctaaattgcaccaccacactccagtctgggcaacaaagcaagactccatccaaaaaaaaaaaaaaaacaaaaaaccccaaatatgtcagtatgttaaagatttctttaagcttttgttttttattgtttgatctttttaccatttttaaaaatgcttctgagtgatttatcagaacgtgtctttcaaagcacatttttttaaaccagaaatccatctgacttctatcatgcaaaacccaggcatatgggattcccacatacagttgtttctaaagactaccccttggatgtcccccataaaacccaaaaatgagcatcctaatctactgaaaatctaaaataattgaagtcatcacacaagaagcatagaagttaggtggcctgcctcctgccattttgattattctgaaacaccttttcttgctctgggcattagtgctttgagcagagggagatccctgggcttagcctcaagagttgggttagactcctgactgctccttcccgggttgtagtgctcaatcagcattcattatcattccctttttcctccttcctaacagagccttaattttctttttttctcttttttctttttttttgagacagaatctcgctctgttacccaggctggagtgcagtggcatgatctcggctcactacaacctctgcctcccgggttcaagcctcagcctcccgagcagctgggactacaggtgggcaccaccatgcccggctaatttttgtattttttggtagagacagggtttcaccatgttggccaggctgatctcaaactcctgacctcaagtgatccactcacctcagcctcccaaaatgctggtattacaggcgtgaggcaccacgcctggccaagagcctttattttcattaagtatcccaagtcatctaaggataatttcatgcctcttgccaataattgattcaggaataggtatgtgaattaatcaagggcagtgataggtgaggagaagtttgctaaggactttaaaggaaagtttcctagttttcaagaaaaagctacagaaagaaacaatctcttcctctggcattattgtgtgcagatttgaggcccagaactagagaaacagagtcagcgcagctaggtatgtcagccctgaagaccacctctcacctctgaaggttcacacaagtgagccaatatctttctgcattatttaaaccagttaagatagatttttgttagctgtggccaaagacattctaactgatacatacatacatgattcagcttctgcagttgtcagcaggtatattaatttctgccttgctagttccttcagtggttttggaaagcaaaatgattcagtgcatgtgaatgtgctttgtaaactgtaaattgctattcaagggcaagctgttactattagtaataattttgctactaagtcttaggtcttagataccaattttgtttctttctttttcatttttatttttttaggacaggatgttgctctgttttttttttttttatttttatttttttgagacgaagcctcgctcttgtctcccatgctggagtgtgatggcacgatctcagctcactgcaacctccgcctcccgggttcaagcgattctcctgcctcagcgtcctgtgtaactgggattacaggcacctgccaccatgcgcggctaatttttgtgtttttagtagagacgggggtttcaccatgttggccaggctggtctcaaactccggacctcaggtgatccaccgcgcccggcctgttgcccaggctggagtacagtgacatagtaacagctgacctgttactcaggagcctcgaactcctgagctcaagcaatcctcctgcctcggccttacaaagtgctgggattacaggcatgagccattgtgcctgccagatacaaattttaattcactatataaattgtatgtcttagaatgtatttaactcatttattttaaattgatacttccagtgaccttatgagcacttacatatcatcattttacatcatataaagcagttatatatttatagtatctgttgaggatattttcagcaattagtttttatataaaggccctaaggccttttgaatagccattatgttaaagggttaaaaaatgtccacaaaatagggtcttcttacctaaaaactgatctttagcatatcctctgtgtcagtatctacatttgtaaggagggttttcataaaaattaagggagacagtacatgtgaggtactcacagcaggacctgaaacatagttaccagcagaataataacagttcgacctaacactatgttccagggatgttctaagaacttcacattaatcgactggtactgcagaactgtattcttgttctattgcatttttaaatttttaaaatagctttattgcttaaggaaaaatgtcacatttttattatttagacaagattgggcgtgctgaaggtattatggctgtagacacatttttattatttaaaaaattcaaatacagaaaagtatgaagatgaaatgaaagtcacctcaaattccatcttgttacttgtaggctggataagcaaccaggcctttgtgtttactaaggcaggtacacatatgtatacacacatatacacacaagtatatatatgcacttatagtgtatatgtgtgtgtatatatatacatacttatgcatacataagttatttccatatgtactatatacatgtctatttttagttggacaaaaggaaaaactggcattattttttaaattatagttgattccacatcctagggtatgaaagaagccagatttttcatattgtttgggatattgcttgtaagtgggtagggtctagttaggcagcagatacttaaatacatatttacttaaataaggtcatactgtctttttaaatgctcttaatttttttaaaatttaaagtagccctttagtcacataacacatcgctatgattttttacatcataattacttacttctacccaatttctcttgtttatttattattctccctaacagctgccttttttcttttataaaaaaaaaatttttttttttttgagacagggtctcactccatccccaggctaaaatgcaatggtgtgatcgtggctcactacaatctcaaactcctgggctcaagtgatcctcacagcctcctgagtagctgggattatatgcatacaccaccatacctggctaattttttcttattttgtacagacaggttctcccatggaatcaacctaaatgcccatcaacagtaaactggataaagaaaatgtggtacatatacaccatgaaatactatgcagccataaaaagggcacaatcatgtcctttgcagcaacatggatggagctggaggacattatcctaagtgaagcaacacaagaacagaaaaccaaatactgcatgttctcacttacaactgggagctagacaatgagaatatatggatactaggaggggaacaacacacactggggcctacttgaggatggaggctggcaggagggagaggatcagaaaaaatacctatcaatactacgcatattacccagatgacaaaccccatgacactcagtttaccgatataacaaacctacacatatacccttgaacctaaaataaaagtaaaaaagggccaggcatggtggctcatgcctgtaatcccagcagtttgggaggccgaggctggcagatcacctgagatcaggagttcgagaccagcctggccaacatggtgaaaccctgtctctactaaaaataaaaaaatacaaaaattagccagatgtagtggcaggcccctttaatcccagctactcaggagctgaggccagagaatcccttgaacctgggaggcagcggttgcagtgagccgagatcatgccattgcactccagtctggggacagagtgagacttcatctcaaaaaaaaaaaggagagagagagattgagagagagtccctgcccaggctggtctcgaactcctaggcttaaaagatcctcctgccttggcctcccaaaatgctgggattataggcataagccacaacacccagcctctttttagaagtttctaattgtggtaaaaactcataacaaaatttaccatcttaatcattttttagtatgtagttcaatagtgctaagggtattcacatagttactcagcagattaatagaactttttcatctcgcaaaactgaaactgtatactgaccaaacaatccccttttcctcctccttccaggccctagtaaccatcattctacttcctgtttctgcgaatttgcagcagtcgtatattttatgtcaatttatattctccagcacctagtatagtcatgctccataaatatttgttaagtgatgaatgaatctgtatttgagctatacacaaacaaatgaaacaagaagaaagtcacacagcctcatctgtactaaggaatcaatacccgctgtcttaggccattcttgccattgctataaagaaacacctgaggctgagattttttttaacacttcagcaatttgtctaaggtctcagcatttgcaaagtggcaaagttataattcaaactcaggtgtgtctgattcccaagcttgtcttctttgtatgaggttatgctgcctaccctaagctctgccgtccctcgtttccataactggccccactgagttcttcaccataggactcagtctcactattttcagattattctcagatttatacatctctgggacaggcaatacatttttggctatgtctttctccaattttcgaagtacaaggcaaataaacacagtgtgtttcctaggacaagagtcattacctctcagaagcttggattccaaatctaaaatcatatacttaactgatactcaatgacaatgtgattgagagttctatttgtcaacttgtctaggctatatcgtacctagccattcaaccaaacactgtgtcacaaccaaagatggtgttgtgaaggtattttgcagatgtgataaatatctacagccagctaactttaaggaaaggggattatcctggataatctgggtaggataaatccagttcgttgaaagtctttaagagtagaattcaggtttccctaaggaaaaaagaaattgtgtctatggaccaaagtgtccgcctctgcctgagagtttctagcctgccgttcctgatggcctgccctgcacatatcagacttgcctaccttgcccccataatcacagaaaccaattcctcacaataaagctctttcctctctctctctctgtgtgtgtgtgtgtgtgtgtgtgtgtatgtttctgtgtgtgacacaaaaagcacccaggagtgctgaacaaacatgatttcttccaactattagtgtcctgatgataacccctggggctaattagtccccaagtattcacattgttaactggatagagtgtctgcagggacaaaccctagagccctggatgatagatatgttaccatctcttccctctccctgcctctgatggagtgggctttgtattgatctctacacccaacttatcccagacttaaccctggccctatctctccaacacttgcctcatatttcaccctttagcctgagtcctgagtgataagtaccatctgactttcctactactgtgcccagcctaatttaatggaaacccagtggttaccatttctggaattgaaatgtgtgtcctttagacgcttcaagcgtggctctgcctgtcccagctgcttaggcttctggagtcgtccttgggagccaggtccatcttactgtccaaccttgatgggcagctcttaagccatccccatctcaccaattccatgcagccaccaacagagcatcctgcttcctaatcattgcacaagccatgaaggatggctagaacgatctattccagctaaccatgagtaacccagccatggaacatacagccttttccaaaaacgagtagaacctagttttccaaagctgagcttgaaaatattcggcatgtgtttgtgtggtacattcccaactttgtgactgaagtttcagaaatcaaattcactttcacctagctgtgttgctatgttatctatagttcgtaatgattctgtctctgcaggcaattgcagtatatgctaaattctgtctactctttttttttttttttttttgagacggagtctcgctcagttccccaggctggagtgcagtggcgcgaactcggctcactgcaagctccaccttccgagttcacgctattctcccgcctcagcctcccgagtagctgggactacaggcgcccgccgccacgcccggccaggatggtctcgatctcctgatctcgtgatccgcccgcctcggcctcccaaagtgctgggattacaggcgtgagccaccgcgcccggccctgtctactcttaaatatccatgagaatgggagactgtggagcagatatagagtcttaaaaaaattattcattttagtcatgaattcaacttccttcaccacaaaaacttagatccaagttgtgaacaactaccaagaatgaccaatcagggattccttttatctcctcacttctcccctgatgaaagcatgtaaagcagtgattgaaagccaactacaaaaagggagacatcctcattattcctagacttaatggtggagatttctacagacaatggttgtattcttggccacatcatttaacatccttgaacttcatccaaaactggaaggaactggactttttttccaaggtcccttttgccactgaagtcccatgagccttgagaatcaaagtactgttgagatgtccattcacccaaggaaggaggagataagggcaggcaatcagaagtcctgtttgcatgaggttctcctaagctccataggcagtggcagtgggctaatcggtaaaaatatggccagtacaacgtgaaggcccactgcatataatggcaggaagaactcactcactttctctttccagaagattttttttttttttttggaaacaggtcttgctctgtggcacaggctggagtgcagtggtataactggctcactgcagcctccatctcccagtctcaagtgatcctcccacctcagcctcccaagtagttgggaccacaggcatgggccacaacaccacaacacccagtttttttttttttgtcttctaaattttgtacagacagcatctcatgcttcccagactgatgctgaactcttgagctgcggcaatcctcctatcttggcctctcaaagtggtaggattacaggcgtgagccaccatgcccagttgaaagtaagttgaactaagcagaattgggctttgaatagtgaaaaggaactggaacagtgtttgctgttgttttatttttctaatggtggtggaagggacgatgctacagggtagacttctaagttctggatgctgtcagagtcagacagagaatcaggcagctgctgagatgcctgggtcttatggagcccgggcagaagcccatcctgcccaggtctgttgtgacccggcactcttgtcagtatcacttcgtgctcaccccagccccactcaagcaccattggtccaccttagtttcacctcgtcactgcatcagcaaaagggattttgggactgagaataaagttctcccattaggagagatgaaagctgctccaactctgaggagagagtccccgaaaagaacagaaacttaccatcagattgaagagaaggggacgtgttccttttgcgaccatgagctgaggttgttgagcatgcctgagagagtggtgcagactagggtcacaggaatagtgacccccctctagcccagaacctgatgaagataaatctctccgtgtctataaggatctggcgcaatctggagaaataagggtcatatgtaaataaacctaattggattgaagggaactgagaggatagaagttaattcctgtaaatttggattgatgccactaatacctcccaatgtaggccagaccatgggcaagagaatatgaattgagatgaatctaagttttctgttttttaaaggctttagatagttttctgacaagttagatcttccttagtcataatagatataaggccaggcatggtggctcatgcctgtagtcctgttattggaaaggggttcttatccagaccccaagagagggttcttggatcttacacaagaaagaattaggggccagtccacagactaaaatgaaagcaagtttattaggaaagtaaaggaataaagaatggctactccatagacagagcagccctaagggctgctggttgcccatttttatggttattttttgatgatatgctaaacaaggggtggattattcatgcctccccttttagaccacataggtatcttcctgacgttgccatggcatttgcaaactgtcatgctgctggcaggagtgtagcagtgaggacaaccagaggccactctcatcgccatcttggttttggtgggttttggccagcttctttactgcaacttgttttatcagcaaggtctttatgacctgtattttgtgccaatctcctatctcatcctgtggcttagaatgccttaactgtctgaaaatgcagcccaataggtctcagcctcattttacccagcccctttccaagatggagttgctctggttcaaatgcctctgacaatcccagtgttttgggaggctgaagtgagaggattgcttgagcccaggagtttgagaccagcctgggcaagatagcaagaccctgtctctaaaaaaaaaaaaaaaaattagccgggcatggggagctatgatcctcccactgcacttcagcctgggtgatagattgtctcttaaaaaataaataaataaataaataaataaataaataaataaataaacgaatacatacctctatgtagagaacaattgttttttattttatttttatttttattgaaacagtgtctcactctctcacccaggctggattgcaatggcgcaatttcatctcactgcaatctccacctcctgggctcaagtgatcctccctgcctcccgagtagctgggactacaggaacatgccaccacaccgagctaactggctaatttttgtattttttagagacagggttttgccatgttgcccaggctggtcttgaactcccggattcaagtaatcctccttccttggcctcccaaagtgctgggattacagccactatgcccagcctaacagttgttttttaaattgagataagataatagcataacataaaatttgccacttaaagcacttttaaatatacagttctgtgacattaaacatattcacattgttgtgcaatcatcaccactatctatctccagaactcttcttgcaaaactgaaacttgtacccattacacaacaactcattttgccctcccacccagcctgtggcaaccacaattctactttctgtctctatgaatttgactaccctagatatgttatataagtggaatcatacagcatttgttctttgtgtctagcttaatttacttagcctcgagattcatctatgttatgttaagaattcccttccctttttaaggctgaataatattacacacacacacacacacacacacacacacacacacacactatattttctttctttttttttttttttgagacagagtttcattcctgttgcccaggctggagtgcagtggtgcaatcttggctcaccacaacctcccgcttctgggttcaagcagttctccagcctcagcctcccgagtagctgggattacaggcatgtgccaccacacctggctaattttgtgtttttagtagagacacagtttctccatgttgatcaggctggtgtcgaactcctgatctcaggtgatcctcctgcctcggcctcctaaaatgttgggattacgggcatgagccaccactcctggccgccatattttctttatccatccatcagtggacatttgaattgtttctagcttttgactactgtgaacaatgcagctacaaacattggtgtgtaaatctctaagaccttgttttcattcttttggatggaagaatggactacccaggagtggaagtcccaagatcagcagtttgcaagctgtagtatcaagagaactgataatatatttccacactgagtccaaaggcctgagaaccagaagaggcaatggtgtaagttctagtttaagttcaagtccaaaggcagggggaaactgacgtcccaggtcaaagatcagatcagatacagtgaatccttccctactcagccttttgttccattcagggccttcaatgggttggatgaggcctactcacattggggtgagcaatctactttactgagtctactgattcaaatgttaatctcatcctgaaacaccttcacagacacacccagaataatgttttatcgaatatttgggcacatggtggcccagtcaagttgtcacataaaattaaccatcacatatgcaaattctctgtttaatattttaaggaaccaccatattgttttttatagcagatgtaccattttactatccctccagcaatgcacaatagttccaatttcctcacatccttgccagctcttgttgttttctggttgttgttgttgtttttttaatagtagccatcctagtgcatatgaagtatacttcttccatcatgggtataatttttatttccctaatgattagtgacattgagcatctttttcatgtgcttcttggccatttatatatcttatttgaagaaatgactattcaaatcatcaatttttattattattatgttttaagttctagggcacatgtgcaccacgtgcaagtttcttacataggtatacatgtgccatgttggtttgctgcacccatcaactcatcatttacattaggtatttctcctaacgctatccctcccccaggcccccgccccacaaaagtcccagtgtgtgatgttcccctccctatgtccatgtgttctcattgttcaattcccacttatgagtgagaacatgcagtatttggttttctgtccttgtgatattttgctgagaatgatggtttccagcttcatccacgtccctgcaaaggatataaactcatccttttttgtagctgcatagtattccatggtgtatatgtgccacattttctttattgcgcctattattgatggacatttggggttggttccaagtctttgctattgtgaatagtgccgcaataaacatatgtgtgcatgtgtctttatagtagcatgatttataatcctttgggtatatacccagtaatgggatccctgggtcaaatggtatttctagttctggatccttgaggaatcaccacactgtcttccacaatggttgaattaatttacactcccaccaacagtgtaaaagtgttcctatttctccacatcctctccaacatctgtggtttcctgactttttaatgatcgccattctaactggtgtgagacggtatctcattgtggttttgatttgcatttctctgatgaccagtgatgatgaccattttttcatgtgtctgttggctgcataaatgtcttcttttgagaagtgtctgttcatatcctttgcccactttttgatgggtttgtttttttctggtaaatttgtttaagttcattgtagattctggatattagccctttgtcagacggagagattgcaaaaattttctcccattctgtaggttgctgttcactctgatggtagtttcttttgctgtgcagaagctctttagtttaattagatcccatttgtcaattttggcttttgttgccattgcttttggtgttttagtcattaagtccttgaccatgcctatgtcctgaatggtattgcctaggttttcttctagagtttttatggttttaggtcttatatttaagtctttaatccatcttgagttaatttttgtataaggtgtaaggaagggatccagtttcagctttctgcatatggccagccagttttcccaacaccatttattaaatagggaatcctttccccgttgcttgtttttgtcaggtttgtcaaagatcagatggttgtagatgtgtggtgttatttctgaggcctctgttctgttccactggtctatatatctgttttgatgccagtaccatgctgttttggttactgtagccttatagtatagtttgaagtcaggtagcgtgatgcctccagctttgttctttttgcttaggatcatcttggctacttgggctcttttttggttccatataaaatttaaagtagctttttccaattctgtgaagaaagtcagtggtagcttgatggggatggcattgaatctataaattactttgggcagtatggccattttcacaatattgattcttcctatccatgagcatgggatagtcttccatttgtttgtgtcctcttttatttcattgagaagtggtttgtagttctccctgaagagatcctttgcatcccttgtaagttggattcctaagtattttattctctttgtagtaattgtgaatgggaattcactcatgatttggctctctgtttgtctcttattggtgtataggaatgcttgtgatttttgcacattgattttgtatcctgagactttgctgaagttgcttatcagcttaaggagattttgggctgagacgatggggttttctaaatatacaatcatgtcatatgcaaatagagacaattttacttcctcttttcctaatcgaataccctttatttctttctcttgcctgattaccctggccagaacttccaatactatgttgaataggagtggtgagagagagcatccttgtcttgtgctggttttcaaagggaatgcttccagtttttgcccattcagtatgatattggctgtggatctgtcataaatagctcttattattttgagatacattccatcaatacctagtttattgagagtttttagcattaaaggctgttgaattttgtcaaagaccttttctgcatctattgagataatcatgtggtttttgtcattggttctgtttatgtgatagattacatttattgatttgcatgtgttgaaccagccttgcatcccagggatgaagccaacttgatcgtggtggataagctttttgatgtgctgctggatttggtttgccagtatttcactgaggattttcgtatcaatgttcatcagggatattggtctaaaattctcttttttgttgttgtgtctctgccaggctttggtatcaggatgatgctggcctcataaaatgagttagggaggattccctctttttctattgattggaatagtttcagaaggaatggtaccagctcctctttgtacctctggtagaatgtggctgtgaatccatctggtcctggacttttttttttggttggtaggctactaattattgcctcaatttcagaacctgttattggtctattcagagattcaacttcttcctggttcagtcttgggagggtgtatgtgtccaggaatttatccatttcttctagattttctagtttatttgcatagaggtgtttatggtattctctgatggtagtttgtatttctgtgggatcagtggtgatatcccctttatcattttttactgtgtctatttgattcttctctcttttcttctttattagtcttgctagtggtctatcaattttgttgatcttttcaaaaaaccagctcctggattcattgattttttgaagggtttttctttttttttttgtctctatctccttcagttctgctccttatcttagttatttcttgccttctgctagcttttgaatttgtttgctcttgcttctctagttcttttcattgtgatgttagggtgtcgattttagatctttcctgctttctcttgtgggcatttagtgctataaatttccctctacacactgctttaaatgtctcccagagattctggtatattgtgtctttgttctcattggtgtcaaagaacatctttgtttctgccttcatttcattatttacccagtagtcattcatgaactagttgtttgatttccatgtagttgtgcagttttgagtaagtttcttaatcctgagttctaatttgattgcactgtggtctgagagacagtttgttgtgatttctgttcttttacagttgctgaggagtgttttacttccaattatgtggccaattttagaataagtgtgatgtggtgctgagaagaatgtatattctgttgatttggggtggagagttctgtaaatatctattaggtccacttggtccagagctgagttcaagtcctggatatccttgttaattttctgtctcatttgtttgtctaatattgacagtggggtgttaaagtctcccattattattgtgtgggagtctaagtctctttgtaggtctttaagaacttgctttatgaatctgggtgctcctgtattgggtgcatatatatttaggatagttagctcttcttgttgcattgatccatttaccgttatgtaatggccttctttgtctcttttgatctttgttggtttaaagtctggtttatcagagaccaggattgcaactcctgggttttttgtttttgttttccatttgcttagtagatcttcctccatccctttattttgagcctatgtatgtctttgcatgtgagatgggtctcctgaatacagcacactgatgggtcttgactctttatccaatttgcccgtctgtatcttttaattggggcatttagctcatttaaatttaagattgatattgttatgtgtgaatttgatgctgtcattatgatgctagctggttattttgcccgttaattgatgcagtttcttcatagcattgatagtctttacaatttggcatgtttttgccgtggctggtactggttgttcctttccatgtttagtgcttccttcaggaaccgttgtaaggcaggcctggtggtgacaaaatctctcagcatttgcttgtctgtaaaggattttatttctccttcacttatgaagttttgtttggctggatatgaaattctgggttgaaaattcttttctttcagaatgttgaatattggccgccactcttttctggcttgtacgttttctgccgagagatccactattagtctgatgggcttccctttgtgggtaacccgacctgtctctctggctgcccttaacattttttctttcatttcgaccttggtgaatctgagaattatgtgtcttggggttgctcttctcaaggagtatccttgtggtgttctctgtatttcctgaatttgaatgttggcctgccttgctaggttggggaagttctcttggataatatccaagaagagtgttttctaacttgcttccattctccccgtcactttcaggtacaccaatcaaatgtacatttggtcttttcacatagtcccatattttttggaggctttgttcatttcttttcactcttttttctctaattttgtcttcctgctttttttcattaatttgatcttcaatcactcatattctttcttccgcttgatcaattcggctattgaagcttgtgcatgcttcatgaagttctcgtactgtggttttcagctccatcaggtcatttaagctcttctctacactggtgattctagttagccattcatctaactttttttcaaagtttttagcttccttgcgatgggttagaacatactcctttagctcggagaagtttgttattaccgaccttctgaagcctacttctgtcaactcatcaaagtcattctctgtccagtttcgtttgcttgctggaaagttgtgttcctttgaaggagaagaggcattctggtttttggaattttcagcctttctactctggtttctccccatctttgtggttttatctacctttggtctttgatgttggtgacctacggatggggttttggtgtggatgtcctttttgttaatgttgatgctattcctttctgtttgttagtgttccttctaacagacaggccccccgggtgcaggtctgttggagtttgctcgaggtccattacagaccctgtttgtctcggtatcaccagcagaggctgcagaacagcaaatattgctgcctgatccttcctctggaagcttcatcccagaggggcccctgcctgtatcaggtgtctgtcagaccctactgggaggtgtctcccagtcatgctatacaggggtcagggacccacttgacaaggcagtctgtctgttattggagctcgaatgtcatgctgggagaaccactgctctcttcagaattgtcaggcagggttgtttaagtctgcagaagctgtctgctgccttttgttcagatatgccctgcccccagaggtggaatctagagaggcagtgggccttgctgaactgtggtgggctccacccagttcaagcttccctgccactttgtttatactgtgagcatagaaccacctactcaagcctcagcaatggcggatctccccatccctaccaagctccagcatcccaggtcgatctcagactgctgcactagcagcgagcaaggctctgtgggcataggacccgccaagccaggcacaggagggaatctcctggactgccagttgcaaagaccatgggaaaagcacagtatttgggctggagtgtaccattcctccaggtacagtcactcatggtttcccttagctaggaaagggaaatcccctgaccccttgaacttcccgggtgaggtgatgccctgccctgcttcggctcaccctctgtgggctgcacccactgtccaaccagtcccaatgagatgaaccaggtacctcagctggaaatgcagaaatcacccgtcttctgcgccaatctcgctgggacctgtagaccggagttgttcctatttggccaccttgaaagtgaccctaaatcatcaattttttaattggattgcttggtttctttggtgtggttgagttataggagttctttctatattctagatgctaatctcttatcagataaatgatttgcaaatattttctcctaaaaacaattgttcaagttgacatgttgatatagtttgaatgtatattcccaccaaatttcatgctgaatgataacccccaatgttggaggtggggtctggtgggaggtgtttggatcatgggggcagatctctcatgaatggcttgggccatcctctttggtaataaatgatctcttggtctgagatctggttgtttaaaagtgtgtggcatggcccctactcttgtgcttactcttgttcccgccatgtcatgtgcctgctcgccctttgccttccaccatgattggaagcttcctaagacctcccaagaagcagatgctgatatgcttcctgtgcagcctgcagaattatgagccaattaaatatattttctctataaattatacagtctcaggtctttctctttctttcttttccttccttccttccttctctctctttcttctctgtctttctttctttctctttttctctcttctttctctttctctttcttttcttttctttccttttctttctttcgagacaagatctcactctgccacccaggctggcgtgcaatggcttgctcatagctcactgcagacttgatttcctaggctcaagcaatcctcttgcttcaccttcccaagtagctgagactatctgggtaggtgtgagctatgaggtgtgagccaccacgcccagataatttttaaactttttgtagagatgggtttttgctatgttgcccaggctgttctcaaatgcctggcctcaagcaatcctggccccgtaaagtcctacaattacagccgagatccgccatgctctatttctctattgcaatgcaagaagggcctaacatacatgtcttaattgttttttaagccagaagacatgtcatcaacaaaattcatatgttcaagccttaacgttcaatgtgactatatttagacatagagcctatgagaaggtgataaaggttaaatgacatcataagggttagaccctaatcctatagaactgatgcccttataagaagagacagagcagccgggcgcagtggctcatgcctgtaatcccagcactttgggaggccaaggtggggagatcacttgaggtcaggagtttgagaccagcctggccaacatggtgaacctccatctctattaaaaaaatgcaaaaactagctgggcgtggtggtgggcacctgtagttccagctactcgggagcctgaggcaggagaattgcttgaactgggagatggaggttgcagtgagccgagatcacgccactgcactccagcctgggcaacagagcaagaccctgtctaaaaaaaaaaaagaggcagagcctgggtacagcagctcacatctgtaatcccacactttgagaggctgaggtgagaggatcacttgaggccaggagttcaagaccagcctgagccacaaagtgagatcctgtctctataaaaaataaaacttagccaggtgtggtagtgtgtgcctgtagtggcagctactcaggaggctgaagctggaggctcatttgaacccaggagttggaggttgcagtgagctatgattgcaccactgtactccagcctgggcaacagagtgagaccctgtctcaaaaaaaaaaaaacaaaaaaaaaaccctaaaaaaaaaaaaagcagaacaggcagaggtacaaggctcttggtctgtctgtctgtctgtctgtctgtctctctctctctgtctttctcactctctgtctctaccatgtgaggacacagtgaaaaacaggccatctgcaagccaggaagaaggccctcaccaagaacaaaaccagctgatatcttgatcttggacttttcagcctccaggaatgggagaaataaatttttgttgcttaagccacccaatctgtggtattttgttatggcagcccaagctgactactatgacgtatattttatgattaaactagtgatacatgctgatgggacagtttcaacaaacataaaaggaataaagaagtaaaaatcatttgaaaccctgaaacccggagataatcatgttatgttatgcatccttccaggcttcttcctatgcatgtagaaaacttttcacaatccagatgctgttttgtaaccttttcttagcaataaacacaagtgtacatgatggttttgttttggtttgtttggtttttttgagacggagttttgctcttgttgcgcaggctagagtacaatggcgtgaccttggctcactgcaacctctgcctcccgggttcaagcaattatcctgcctcagcctcctgagtagctgggattacaggcatgcgccaccatggccggctaattttgtatttttagtagagatggggtttctccatgttggtcaggctggtcttgaactcctgacctcaggtgatctgcccacctcagcctctcaaagtgctgggattacaggcacgagccaccacgcccggccacgtggtcgttttaatgcactgcaaaatactccactgaacagatctaccataatgtatttaatcagtcccctagtgatagagatgtaggtgatttctaatttatcattattgtaaacaatgcttcatgaaggccttttatgtatatctttgcatgtttgtccaatttgttcagtgggatgaattcccagaaattaaatttctgggccaaaggatatgcttatttaaaatgttgacatcctgtatattgccaaattaccttccagaaaggctgaaccaatttatactcctactgtgcatgagagtgcccactgctccacacccttgccaaactggcatgctttcaacagcagtaaaaataggttcttgtctgcttttctcctatgagtcctaccaagtgcatgatgtgaaagtgaatgagaggaatataaagttgacagatgggaggtattttggtcactgtaatgttttatctaaagcacaccattttcctctcaaaacaagtgtgatagataagcccccttcattttttagtacaagttctaggacataatttcctaaatggattgattccttagagaatgaatgtctctgaggatgtggaaattattcaagccaaatgtgctttgggctgatagaggatatacaattttgacatagcagtatctatgtgacctcttttttaaagatgcaaagtataatatttttgccctgtgctatccaaagtgtcatactgcagcctactctgaatgtactcattcatttgcctgaagttcccacagagaaaagttttctctgactttgttttatattgaaaaagttttttaattgaagtataatttacacacaatatgaataatttttctctttaaaatctgattgtgaataactgcaaccttcatagataacctttcattacattaaatgagagagaaaagctcttttttttcctcgagacagagtctcactctgttgcccaggccggagtgcaatggtgcaatctcggctcactgcaacctttgtctcctgggttgaagccatcctcctgtctcagcctcccaagcagctgggattacaggggtacgccaccacactcaactaatttttgtatttttagtagtgacaggactttaccatgttggccaggctgatctcaaacccctgacctcagctgatgctcctgcctcagcctcccaaagggctggaattacaggtgtgagccttcgtgcccagcagaaaagcttataattaaacacacactctttgaaaagcacagagaaaagagaatggagttttacatgcagctatttcactccttagttgtatggtctgaagcacataatttagcacaatacgcttcttttactctcatctgataaactagcaaaatgaaatctacactaccttctccatagagatgttggaagcacatccaatatctctaggaaggtccttagcactatagtgagttaaattatatatatttttaaaaatgtgcatccagtcaaatatatctaatctacttgtatctgatcttaaagtttttgtgcttgaggggaatgtatttctttttcaaatgaaaacatgttgatcagataaatgtttacgatggaaaattatccttttgttttggcattaatgtcaattaaaagcattctgaaactgttcagcttcactgatgatattaatgaaccttacatgagaaaaagccagaaaataattagcataattataaaatgtgaactgtacattaataattctctttgttttttcccttttagccacttaataaattgtgtgtatcaaattattataaatgtggtacttctgatgttagcagaattatgttttaaaaggcataacaataatatttgtttaatttagaaaaaagaaagatcactttacatcctgttatcctagtgatactgtgaatacaattggttaatgcaaatataattcatactactgaattgtacacttaaaaatggtaagatgataaattttatcatctttataaattttcaaatttatattctaatatcgtctttctttttatttatttatttagagacagggcttgctctttcacccacctggccagagtgcagtggcactatcatagctcactgtagccttgacctcctgggctcaagccatccttctgcctcagcctccctagtagctaggactataggctctcagcaccacacccggctaattttgttttgttgctttggtagagatgagttctctccatgttgcccaggctggtctgagattcctggtctcaagccctcctgccttggcatcccaaagcactgggatcacaggcatgagagccttgccctaatgtgcctgcctgtctgcctgccttccttccttccttccttccttccttccttatttctttcttccttcctcttttttttttcttttttttttttttgagacagaatcttgctcagtcgcccaagctgcagtgcagtcgcacaatcttggctcactgcaacttctgcttcccgggttcaagcaattctggtgcctcagcctcccaagtagctgggattagaggcacgcaccaccatgcctggctaatttttgtattttcagtagagacagggtttcaccatgttggccaggctggtctcaaactcctaggctcgagcaatccacctgcctgagcctctcaaagtgctgggattacaggtacccagcttttctttcaacacactggttaggggtgaatgcttatcccctcagctctctgtctgctccccacgagtgacagcttgggatgcttgggcttcttcccttgtctcactctctcctcgggaaaaagcaccttctttggcaagattgagggaaagaattgctaaatgtgtgactcagcccctctttctctctgagtggccagaccttaaggacttgacttaccttgcaataagtttcctagagtaagccctgccctgcaaaaaggactgaagttagaagaggtttattttaattcagggaagtgagtatcagtaagcccatttggccacagactatgccacattctccaaccagctttattagctgtgaactaatgttttttaaaaaataatttttattgtggtttaaaaaaatagatgacataaaatttatcatcttaccatttttaagtgtacaattcagtagtattaattatatttgcattaaccaatctctaccagtctccagaactttttcctcttgcaaagctgaaactctatatccattaatcaacaattcatcattttcccctccttccagccgttggcaaccaccattctactttctgtgtctatgattttcactactctagatacctcataggagtggaaccatgcagtgtttgtcctttttgtgactggctcatttcacttagcatgatgtcttcaaggctcatccatgttgtagcatggtgtcagaacttccttcctttttaagactgacattttgagctcccagattccctgcttctatgtctccactgactcaaaactgagagctagagggagggtgtaactaattttcatcccctcaagccccatccaactggataatagtgtgttgtggtagacatctattgttttctctggccagggtcaaatagcaaatctggacagaggtaaagtgagactttactcaaaagggttattgcagtaagaggaagaggactattataatagagagaatgctctgatggtcaactgtaagatctgcaagcatctccaagaccaggcagaaaagggcttttcttttacagggaggaggaaagcaggctggaaggaagcaggtgaggtctaccaggatgagcaggttatcctgcggtgcgtcagggaacagttccccctgctgggtacgctagtctcagtaggggccattaaggagggcttgttcctagctctaatgtttaagggtgggccaagttcagggacttggaagaatgacagaggcctgactaaagtttagcccagttagcaggcattttgtccagattggcctgtggaaacaaacaggtcagctaatcatttatgagtcaaagaatgggaaattagaggatctctatatggctttgtcatagttagacaagggggtcactccaagtctctaagtcgtatggggaagggcaattatttgctgtaagtcatttcctggaacacaaaggttggagggaggctgggcgcagtggctcatgcctgtaatcccagcactttgggaggcagaggcaggcagatcatttgaggtcatgagtttgaaaccagatggccaacatggcaaaaccccgtctttactaaaaatacagaaattaaccggcgtgatggtgtgcacctgtagtcctagctacttgggagactgggggaggagaatcacttgaacccaggagacggaggttgcagtgagccaagatctcaccactgcactccagcctgggcaacagagcaagaccttgtctcaaaacaaaacaaaacaaaacaaaaaagttggagggagatggtttcctgatccttgctgttttccaggggcacagggcttgacgttgtcactaataccctttcctactccaggtgttgacagaacccctctttctcatggaaaatccacctcacttattttgagtgaggctgatcccactttctactcatacggatggacatgtggcccaggccttgccaattcaaatcacttattctctgattagtattattgctccagcaaatatgtagatgctccaagcagtaccgatcagtctctcctgagatttgatcatgtagatgctgggagagaaccctgatatgaacccagccatgcctagcttaggtctacctccagacttcccagttatgtgaacaaataaaacccctctttgcttaactgtgtgattcttttgttatcccccaccccacaaataactatgttgtgggcactgaggccttgttggcttggggtgtttgaaggatcctggctacctctgattctggaggatttcaagggtcttattttagttccaacagtgagactgttgactgcagagttgtggctctatttcaagcttgagtaatttcatctgccctccttgaaaaattttactgcaagatatttaatattctttcttccttcatag

SEQ ID NO: 22 - DNA, 10589 bp, Homo sapiens
  source 1..10589: mol_type = other DNA
gtaagtcctggctggatgcagtggctcatgcctgtaatcccaaaactttgggaggccaaagcaggtgaatcccttgagcccaggagtttgagaccagcccaggcaacatagggagagcctgtctctacaaaaagtttaaaaattagctgggtgtggtggcgtgtgtctatagtcccagctactcaggaggctgaggtgggatgattgcttgatcccaggagatggaggctgcagtgagccaagaggtctcacccctgctttggagggaaaaaatatagtatcccaacataaattttttaaaaaaatcctgtttttcctttaaaaaataagctgtaatgccctagatgttaaattgattttcaagttattattattatttttaatagaaatgggatctcatgctgtccccaagctagagtgcagtggtataatcatagctcactgcagcctcaaactcttgggctcaagagatcctcctccctcagtagctaggactacaggtgcatgccaccatgcccagctaagttttgttttgttttgtttttggtctggtagagataaggatctgaatatgttggtttaggaacacctggcctcaaacgatcctcctgcctcggcctcccaaagcactgagattacaggcatgagccaccacaccaggcctcgagttctttttgataaattatatgaacaatagattaacataaagaatggaaggaatcgtttttgcgagttttcagggatagtgcatgaaaaggcctcatagaagaaataaaatggggacactcatataaaccacaaagctttagtttacatttgacattttcccaacttcaacagatagatctacttaatgactagattgatctggtaaattagaaaagtcatgaaatggatcatgaaaatgatttaaaatgttttaattatggaagggaaaaaataagaaatagcagctaatcttcctaagtaaatgtgaaaaaaaaaaaaaaggtaatttaacaaatattcctggaatgccacttatgtgctagtcactggggatatagcaatgaacaacacagacaaaattttctgccgtcatgaatcttctagtaaaaaatgcaccaataaaataaaatgatgaatctccaagaataaacaacatttgtgttcccaaggcaagggagcctttcactgacttgacattttgctgctctctgtttgctggaaattgccctataccagcctgggcaacatgacaaaaccccatctctaccaaaaccacaaaaattagccaggcatggtggtgcatacctgtggtcccagctactcaggaggttgagatgggaggatcacttgagcccaagaggttgagatcgcagtgagctgagatcacgccactgcactccagcctgggtgacaaagcaagactctgaaaaaaaaaaaaaaaaaaagaaggaaggaaggaaggaaaaataaattgtactataccaaaatgttacagtgttcatctctgagtgatttttttatttctccttaatattcttctgcattttccaaattttctacaataagcttctattactttttaatcagagaagtaacttattagggggaaaaaaccctaataaactagaagttgaaatccttcagtgcagagggctgacctgaatacttgcctttggcaccttcctgaactgaaaaagtctaaaaagcaggacttgttgctttcactttgggtaactgtccccctccctcctctcattcttgagctttcctgatgtatcctaaagcaatttgttttatagtatcacatacctttttttttgttcacttttaaacattctgggtgcctagagccttgtctctttcttgcctctctctctcttcttcctgactacctggttcttctgaccttttctctacaaagatcaccactgttctacctctctgtggaccagataaaccctattactccacattgcccttgtcccttccaagtctaactaccacttttcaacaaactgaactctctctcggttactatggcatcccctgaaaaaatgtcagtcaaagctttctcctatacgcttacatttctaaaagttgtttaacaaatttacgaaagaatttttttagcccctgatgggccgaagcattatgttacagtctttgagaacttaaggtcataatagataattctttcattttgttttttataattggtttaatcagaattttattgttacaatcaatagttgctttacttttctctctctttagtttaaagaaatccctagcagtttccctatttttttttattggttcttagtatgaaagttgcattgacttttttttttttttttttttttttttgagatggaggtttgctcttgtcgcccaggctggagtgcaatggtgtgatctctgctcactgcaacctctgcctgccgggttcaagcgattctcctgcctcagcctcccaagtagctgggattacaggtgcctgccaccatgccaggttaattttttgtagttttaatagagacagggtttcaccatgttgaccacgctggtctcaaactcctgacctcaggtgatgcacctgcctcagcctcctaaaatgctgggattacaggtgtgagtcaccacacacagccacattgacttttatcaatgtaaagggagaagtcacttgatatttaggtaaattgtttaatagtattttatctacttttttcaaattggtaaggtgtatttttcatgccttaaaaatgtctttattgaagtataacatacagtaaaatacatttagtgtatttagtgagctttagtgtacaactcagtttttttttttaacataggtatattcccatttaaccaccaccagctcaagacacagaacactcccagcaaccccacaatttctcttatctcttcccagtcaatatcctcttgccccatactcctagcctactcttgccagaatagttaccactattctgacttctatcaccatttataagttttgcctatttttaaacttgaaataaacagaaccacccagtatttactcttttgttttggcttctgtaactcaacattattttcctgttcagttgcgtcatcatttttttcttttttattactgtatggtattccattaaataaatatacttcaatttatatatctattctcctgttgatggacatttaggggtttttcgattttttagtatgatgagaaaagttattacaaacattcttgtacatgtctgttggtggacatatgcactcatttctcttgggtatataccaaggggtggaattgctgggtcgtagagtagacatacttctacttttggtaaaattcttaacatatttgcatggcacaaaattcagcaggcacaaaagagtgtacagtgaaaagtctctctcttatctacatctcagttctacagttctcttctccagaggaaaccatattaccagtttcttacggaaacatactttgtatatagaagtatatgtatgtatagtcttgtgttttacaccaaagctactacacaatccaaactcctttacaccttacttctttcactaaacaatttatctttgggattagtctatattagtaacgttgaactgcttcattccattaaagcagcggccctcaaactttttggcacaaggcactggttttgtggaagacagtttttccacagaggtcaggggctggggagatggttttgggatgaaactgttccacctcagatcatcaggcattagattctcataaggaacacacaacctagattcctcacatgtgcagttcacaaacgggtccgtgctcctatgagaatttattactgcctctcatctgacagaattcggagctcaggccgtaatgctggctcacctgctactcacttcctgctgtgcagcctggttcctaacaggccatggacccgtaccagtccatggcccagaggttgggacccctgcactaaatgactgcatagtatgctaacttgcacatctaagaatatatctgtaggatgaaaacagctttgggcatttaaaattttgccttaattatataagaaagcctgttttcccccactttcaccaacacaatgagtttgtagacattttaattcttgctagtcttaggtggaaaatggtatctcattgtacccttaaatcttaaatctcccttaatataaggaaggtctttccatatgtaaagatttatttttatttcctgacctgtaagctgtttatattgtttgtgtatttttcttcgattattttttcttattttataataattatttatatattaagggaattagccctcggtctgtgatatgagttacacttttttaaatgaaaattattttattttaattttgagacaaggtctcactctattgcctaggctggagtccagtggcacaatcatggttcactgcagcctagacctcccaggctcaagagatcctcccacctcactcccacctcagcctcctgagtagctgggactacaggtgcacaccaccacacggggctaactttttttttttttttttttttagagatggagtcttgctatgttgcccaggctggtcttgaacttctgggctcaagcaatcctcccagctcagcctcccaaagtgctgggattacaggcatgagccaccacctctagcctgaaactcatataatacatagcaatttaagctcccacatatattaatttagaaaggattgcaacttaacaaacatttattgtgccaggcactgcgaaaagtgctgaatatataataaagattgatttgtacctttaaaacacttacaatctaagaacagaaagacactcccaaaccaaatgatcattactttatcatttggtaagttttattataggatagacgtgtacactacatgcacttcaagctcaacgtgtccaaaactgagtttgttgtcttcttctaggacctctttttccattgttccgtatcacagataatggcatcattagtcactcagctgctttgtttagaaaccttggagtgatccttgagtcctttctctccttcactctcaaaatggatttgccatttatctgaaagatcattgtgaaggactgtaggaaggaggaggctggtggctgagaaactattaattgcattagtccagatagcaatcgatgaggtagcaaccatgagaatggggaagaagacagaagagggacttgatgatttttaagtatagccagtgaggaagagttggggataagttccacatttctggctgagtggatgatggaagtcatgcatagagatggggatggagtgcgtaactgtttcaggaagggaaagatacaggattcagtttagacattttgtgtttgaggtctggtgtgacaaccaaatataattttaagtacagtactgccaactcccactttcctgaggtcataaaagggcatgttactatggttaattaaaaatcgatatggataattcttaaactgtccctctttattgctcacggctttcctgggtgttcacagtcttcctgggcgccctggtcactggccctgatccagccacaccttctcacaggtactcttatgaaaattaagccctgaaataggcagaatattgtctggtttgagtctcacaactttttctcctagatagaattaaggaggcaatgaacagccaaaacagaaacaggagggagttgtgagagagtagcaaaggggttgaataatttgaagcatagttaattggcctttgaataatcagattgctacaaaagtatcagcttatttacttttgaaatattatattacccccataccaggaaaataaaggaatgagggggaaattacctataatccagtcactcccataggaccactctaagcattatgtaatactatactcgctcccattttttcccagcctccttttcaaatggttataagtcacagtgtaatcattaattgtctaaaatgaatagtggtatcctggtggcataagataatttttataagtggccttagaggaacattgaatataaagtaaatgatcattgtaccctctttaccctgctataaatcattactctctttaaggacatagaaggaaatgtgggcttatgttccaggtacctaacatacaaacaggaagtcgtgcagacctgagacagtctggtatattagcactgaaatacagctaccttttaaattagtaagaacttttttttaacttatgtatgttttgtggcatggtagcatgaaaagatcactggtcttagaggtgggagactcaggctatagtcctagctttggcattaactgtgtggtcttgggtttagttttccttctgtactaaatcaattcagatctcccgcatacctgtcagtgagtgcgttaatgtgaccctgtttgtccgtgcctgatacatgcccacccctgaagctggaggtgagatcacccctctctacactaaaaagaccttgagtcgggaaagagtccagcccccagaattccatgggatgggttgttaccagaaggggaaatggatttgagcaggcaaaaacactagatgttatctaactttgttctccgtatctttatccccaaaatgaagggattggtgtaaaaagttctattaataagtctctctagatctgccttcacaggattgaaagtacagaattgtaccagttgaagtatgaaaaaaactatgctcttcatttgacttctaatttgtggtatctactctctatgacttcagggcaatttcatgagttcagaccaggagttttaaaccaggttcctgagtgactttcctgtttttgtgagctgtctgtgtatacttcctgcagagagaatgttttattaatagcaacatatgccctgaaacaacatacttctttgaccccaacaccgtttttatctttggaaaaccgatgatgtgttactaagtgttaagaatagtttattatttactgtgcagttgccaaaccgaatttatttttactcaaactggacagtacctggctaatacaatgactcccccaaattcaagtttttcgcggcatgtcgtcttattctacaagctgggagagtgtgtgagatcaaaggaatgtgcaaacaggccggagccatggctcacgccagtaatcccagcactttggaagcccgaggcaagcggatcacttgagctcaggcattcaagaccagcctgggcaacatggagaaacccggttgtattagggttctcttagagggacagaactaataggatatataaaatattatatatatatatcatatatacacatatatcatatatacatacatatatatcatatatatacacatatatatatcatatatatgagagtttattaagtattaacttacatgatcacaaggtcccacaataggctgtctgcaagctgaggagcaaggagagccagtccaagtcctaaaactgaaaaacttggagtacaatgtttgagggcaggatcagcatggcagaaagataaaggctcggaggctaggcccatctctttttcacatttttctacctgctttatattcactggcagctgattaggttgtgcccgccagattaagggtgggtctgcctttcccagcccactgactcaaatgttaatctcttctggcaacaccctcacagacaaatccaggatcaatactctgtatctttcaatccaatgaagttaacagtattaaccatcacactggtctttgcaaaaaggacaagaattagccaggcatggtggcacatgcctgtggtcccagctacttgggaggccgaggtgggaggatcacttgagcctgggggacagaggttgcagtgagccttgattgcactactgcactccagcctgggtgacagagtaagaccctgtcgaaaaaaaaaaaaaaaaaaggaatgtgcaaacatactttaagcataattttgccctgacaactcttttttccccaatctctacttgaacgattatttttaatgggactggctctgacaaaataatcctcacaggacctttaaattacataattaagcagaataaaacaatgtataataaaaagtttcctgttcttcaattctaatagcaaatttgcatatatattctctccattagcaaactgggataataatagtggctctctatctcagaaggttgttgaactgattaaaacgagataatgcatgtaaaatacgtggcacaatgtttgatgcaaacaaaatggccataaatattagctattactgttttaccatccataaaaagaatataatgcctacctcagagggtgattctgatgatcgaaagggatacaaagtgtttaacaggccagcacagtggcttcacgcctgtaatcccagcactttgggaggctgaggcgggcagatcacctgaggtcaggagttcgagaccagcatgaccaacatggagaaatcccatctctaataaaaacacaaaattagccaggtatggtggcgcgcctgtggtcccagctacttgggtggctgaaatgggagtatcgcttgagcctgggaggcagaggttgcagtgagtctagatctggccactgcactccagcctgggagaaagaacaaaaccctgtctcgaaattaattaatgtaattaaatgtttaacatatgtttaaaacacacatatataagcatataaagtgtttaatatttaaaaataatttctgctgctgctaatagaagaaatttgtggctgtttttaaggaataatagaatttccaaaatcagtgtctagcaacatttaccttactcatgaatttaaaaaaaccttctgattagaataccagtttcactgctgtttaatagtttaaccctattttgaatcagcaaattagtgttatggttaattttatataaaacataatgaaatgcatgtcccagctctgtcatcaagcagctattccatcttgggcacattcttaatgtttctaggccttccttaccttatcttttaaagggctattataatacttatcttgtgtacttcccatcataataataaaatattatgtgaggttgaaaatttccttatctttaaaagggctataataatacttatcttgtgtacttttcgtcataataataaaatattatgtgaggttgagttgattaaagaaccttgtaaagggtcaaaagaataacaatctggcagggagcggtggctcatgcctgtaatcccagcactttgggaggccgaggcaggcagatcacctgaggtcgggagtttgagaccagcctgaccaacatggagaaaccccatctctactaaacatgcaaaattagccgggtgtggtggtgcatgcctctaatctcagctactcaggaggctgaggcaggagaattgcttgaacctgggaggtggaggttgtggtgagccaaggttgggtcattgcactccagcctgggcaacaagagtgaaactccgtctcagaaaaaaaaaaaaagtaacaatctaacaataatttcttgacttgtcatgtaccaactaaatgccaagcctatgctaactgctatatttatattgtctcatttaattctcacaacagctccattaagtagttgctatttttatgtttattttacaaatgaggatcctaagtcttagagatgttacgtaacttgcttaaagtcacatttcatattaaatgtgcaaataaacatctattcaaactccagattactcttaacctttctactataaaaatgcaagttattattatttttgtataataagcagttttttttaatgacatcgtggtagggaagcccatagaggtgattattcaaatagtaattttttttttttatgagacagagtctcactctgtcacccaggctggagtgcagtggagcaatcttggctcactgcaacctccgccccatgggttcaagcaatcctcgtgcttcagcctcccaagtagctgggactgcaggcatgtgccaccacttccagctaatttttgtttttgtttttgttttgagatggagtcttgctctgttgccaggctggagtgcagtggtgcgatcccggcttactgcaacctctgcctcccgggttcaagcgattctcctgcctcagcctcctgagtagcagggactaaggtcgctagccaccccacccagctaattttttttgtattttagtagagaagggttttcaccatgttggccaggatggtctcgatctcctgacctggtgatctgcccgcctcagcctcccaaaatgctgggattatagacatgagccaccacacccagcctaattttcgtattttcaatagagacgaggatttccatgtctgtcaggctggtttcgaactcctgacctcaggtgatccacccacctctgcctcccgaagtgctgggattagtcatgagccacctcatccggctcaaatagtaatttactaacacattttactcacacatttctgacatttttaagggaacagtggtaaataaaaatgactactccttgaaatatgtgtttaattttctag

SEQ ID NO: 23 - DNA, 52 bp, synthetic construct
  source 1..52: mol_type = other DNA
tcattcaggacgtgagtttcactcgtattacgtttacagggtaggtaggtaa

SEQ ID NO: 24 - DNA, 19 bp, synthetic construct
  source 1..19: mol_type = other DNA
acgcatgattatctttaac

SEQ ID NO: 25 - DNA, 21 bp, synthetic construct
  source 1..21: mol_type = other DNA
cgactgagatgtcctaaatgc

SEQ ID NO: 26 - DNA, 48 bp, synthetic construct
  source 1..48: mol_type = other DNA
gatcccactagtgtcgacaccagtctctaattttttttttcaaaaaaa

SEQ ID NO: 27 - DNA, 61 bp, synthetic construct
  source 1..61: mol_type = other DNA
cgaagagtaaccgttgctaggagagaccgtggctgaatgagactggtgtcgacactagtgg

SEQ ID NO: 28 - DNA, 28 bp, synthetic construct
  source 1..28: mol_type = other DNA
cgaagagtaaccgttgctaggagagacc

SEQ ID NO: 29 - DNA, 25 bp, synthetic construct
  source 1..25: mol_type = other DNA
gtggctgaatgagactggtgtcgac

SEQ ID NO: 30 - DNA, 29 bp, synthetic construct
  source 1..29: mol_type = other DNA
gtttgttgaatttattattagtatgtaag

SEQ ID NO: 31 - DNA, 18 bp, synthetic construct
  source 1..18: mol_type = other DNA
cgataaaacacatgcgtc

SEQ ID NO: 32 - DNA, 18 bp, synthetic construct
  source 1..18: mol_type = other DNA
accgcattgacaagcacg

SEQ ID NO: 33 - DNA, 18 bp, synthetic construct
  source 1..18: mol_type = other DNA
ctccaagcggcgactgag

SEQ ID NO: 34 - DNA, 555 bp, synthetic construct
  source 1..555: mol_type = other DNA
caaattcacatataaaataatagggaagtcgtctgggatccattttcatttatgagtcacgtctttagcaccattggtgctaattctccccgcctcgatgttacagagaattagcacgatatgaacactcgtgtgttttaccacaccccacaccgcgcccgaaggagacaacgatggtggctgaatagactggtgtcgacactagtgggatcttcaatatttagttcccagttgaggatggattcaccagtcagaaaagccattcgattctgtgttacctaatattatattattcaagatattatgaatgtgtatatctagaaacctgcagttgataaacactgtacaaaagtgaagcacatcgaatcatgatactgccattacatttcagtgactcttatatcaacgagccatgggacaatctctcagggaaaacattcatgattttaagagtgaaatacaccccttcccttaaccctagaaagatagtctgcgtaaaattgacgcatgcattcttgaaatattgctctctctctaaaagcgcgaatcggtgcc

SEQ ID NO: 35 - DNA, 525 bp, synthetic construct
  source 1..525: mol_type = other DNA
ctgaattagacaggggtatatattatagtagtcatgtgggtcaactctaatcgggccttcagtgggggggtcctgcccttccccggcatcttcgggaataaagcctccgtcttttcaaaaaataaacatgcctgtatggaaggatgatcctggttctgtgacatactagagggacacccacgcgacacacacatggtggctgaaatagactggtgtcgacactagtgggatctgccttcacaggattgaaagtacagaattgtaccagttgaagtatgaaaaaaactatgctcttcatttgacttctaatttgtggtatctactctctatgacttcagggcaatttcatgagttcagaccaggagttttaaaccaggttcctgagtgactttcctgtttttgtgagctgtctgtgtatacttcctgcagagagaatgttttattaaccctagaaagatagtctgcgtaaaattgacgcatgcattcttgaaatattgctctctctctaaatgcgcgatcggtgcc

SEQ ID NO: 36 - DNA, 444 bp, synthetic construct
  source 1..444: mol_type = other DNA
ctagtgggatctgaaagtggggagtacaaaattacattttataaagtaggaaggcaggttatagatgccagctgcgcttctcagggcatgcaaaatgacttttaccaaatttaaagaagaaaaactaagcaaatgaaattttttaatctttccatttcagtgaccaatggtgagactcttaaacgtttggattccttttgaacaacaacaacaaaattatatttggattccaagtgcctcattcaaatgggctttcatgaaaaagcaaaatgacagggcctaaatgtaaataccactaaagccccaggaagctgaaaagaaaaacaaccagtagggaaaacgtgttctctgtggtcagaagcagcaatgattcccagcgattccatgctcggcttttcttaaccctagaaagatagtctgcgtaaaattgacgcatgcattctt

SEQ ID NO: 37 - DNA, 640 bp, synthetic construct
  source 1..640: mol_type = other DNA
aatcgtgaatttcattgttcttttacgatttgacccagaaaatcgtcttcgttctaagacctcagaagtaatccaaagaacatatacgaaattggatcgatcgaaatcaaaatcgaagatttttagagaataatgaacacagaaacttacggtcagggtaagtgatgtccacctaggtatgagcaagcgcaaacccaatgaagccggtggcagggagcgatggtggctgaaatagactggtgtcgacactagtgggatcctgagaaagaaaggagcttggtgcttgagaaaaagagagaagcctatgtggctgggacacagtgcaccagaagacaagcccaggaggtaggaaccaggccatgcatggatttgaggcacatgtttaggattttgaactttatccttagaggagtggtaacacattgaaggaagtgtcatgaacatatttttgtggctgaatggaactggtgtcgacactagtgggatcagaattttcaagttgaaaatccagtgcactctttcttgtatccgaagaacttgggaagcccaagttaaccctagaaagatagttctgcgtaaaattgacgccatgccatttcttgaaatattgctctcttcttctaaaagcgcgatccttgtc

SEQ ID NO: 38 - DNA, 562 bp, synthetic construct
  source 1..562: mol_type = other DNA
aaattaaataccctcacacatacactcacacacctggaaactcaaagagtacgttcatactaaaagtttaacacaaacgttcaactctgagacatggtctggttaagcagaagaactatgagacaaaaagaaagaattcctcagaaattcatgaagggaaggacaagcctccacatggggaaaaatcagcagacctcaggcttccccactgcgcatgtgagccaggggatggtggaatgacaggatgcaaaggccggggaagaaaataaatgtaagggtatgatacccagccatgctacctcccggccctcccgccccgacatggtggctgaatgagactggtgtcgacactagtgggatctctcgactctggctctatcgaatctccgtcgtttcgagcttacgcgaacagccttggcgctcatttgctcgtcgggcatcgaatctcgtcagctatcgtcagcttacctttttggcattaaccctagaaagatagtctgcgtaaaattgacgcatgcattcttgaaatattgctctctcttctaaatagcgcgatcgtgcc

SEQ ID NO: 39 - DNA, 510 bp, synthetic construct
  source 1..510: mol_type = other DNA
gtattcgatagttgtacatttagccggaacaacggttcccacacttggttttattttttgtactctttactgtgcatatgaccaaatagctgatgggaagtttgggccgaagctttcgagactttgttgtgggtgggctcgcatgatgacgcggctgaacgcaaccggttttgtcaaaaggtggctgaatgagactggtgtcgacactagagggatatcttatttttaaataccaaaatagggatggagaatgagagtgttgtttacagtaatgggatacacttttatgagaggatgagattacaataacaatacctcctctcatagaataaccagcaagtctccaataaattgcagtggaaagattttagagatgactaatctgggatattgagttaatgtgaaccatttgtagacacaggagtttattaaccctagaaagatagtctgcgtaaaattgacgcatgcatttgtgaaatatgctctctcttctacatgcgcgatcgtgcc

SEQ ID NO: 40 - DNA, 682 bp, synthetic construct
  source 1..682: mol_type = other DNA
gtggctgaaatgagactggtgtcgacactagtgggatcaataggagtaactggagcatctttggctcaaatgaggtgactcttggtggggcttttggatgggggctgctgcccaggaagaccaagccatgactagaagcttggaactttcaacctcatccccctgttctccagagaaggaagaggggctggaaatgatgttaataattgataatgcctacatgatagagccccataaaaacccctaaactatggagttctgagagcttccaggctgcctaacacatccacatgggggtgcaccccaaatctacagagacagaagcccctggcccttcaggagctcaggacccttccagacctcatgctatgtatctgttcatctgtatccttttacaaatcctttattaatataataaactggtaaacatgtttccctaacttctaagagccttcctagcaaactaagcaaacccaagaaggggatggtggaaacctgcaaattatagctcattagtcacaagtataggtgatacgtgacaacctactacttgtaattgacatctaaagggggtacaggcttgtgggactgagcccttaaccctagaaagatagtctgcgtaaaattgacgcatgcattcttgaaatattgctctctctttctaaatgcgcgatttccgttg

SEQ ID NO: 41 - DNA, 731 bp, synthetic construct
  source 1..731: mol_type = other DNA
tcttgtggctgaaatgagactggtgtcgacactagtgggatccagtccagaaacacgtgctgcaggtacttgtcacgtcactttagtctcctttaacttgaaatttttgagaagtataggctggtaactttgtaggatattcctcattttatctttttctgatatttctctctactatgttcatgttatgcatttttggcaggaatatcacataattaatgttgtgtcttcagcacattttatcaggattcacaaaatataaaattgtcttattaatagtgatattaacattacaaaatttttttgaaaaggaaatacatttataaaactcttaagtctgtgcatttaaaaatactgtaatataattaacaggtcaaataaatcataatgtaaagatatgaatggaaaagcaataaaaatgtgtatatatacatgtttgtatacatgcatacactcattcatgtggggaggcaaaggaggtaattcaaataaactcagatacttactaaaaatagaaaaaaccttgaacatgaatgagttaaatgtcctatctatgaaatgagaaagcatcagaacaacccatcagaaagcagaacataaaagagaagggcagagagaaggaacaaagctaagactggttctttaaccctagaaagatagtctgcgtaaaattgacgcatgcattcgttggtatgtaatgcgctctcatgtcgacaagtacgatcgctgcg

SEQ ID NO: 42 - DNA, 372 bp, synthetic construct
  source 1..372: mol_type = other DNA
ctagcctttgtggctgaatgagactggtgtcgacactagtgggatcgtttggctcaagggctgatattggtaggggctggtggctgaatgagactggtgtcgacactagtgggatccagctgctcctggatgaagcaaaatattctgtggattaaaaaaatccttctttaaaaattacttgaaaggatagcaggttaaaaggcacagtttgcaaaatctaaaatcttttgcttttttttttatggttattttgaattatgggttctgcctccattttttttctttcccgtttaaccctagaaagatagtctgcgtaaaattgacgcatgcattcttgaaatatgctctctctctaaatagcgcgatcgctgc

SEQ ID NO: 43 - DNA, 626 bp, synthetic construct
  source 1..626: mol_type = other DNA
gttgtaggatgatatttttaggtaatattaagctttatagtgtttgggtatcaagtatattttttctagcttatatttatttggatcctgatgtaaaactgtggttgagcgcgtttcttcttttgagttaggggttcatgggtcttcgtgtcgcactcttttagtctctaattcttagagcgcttcaaccgattgtggctgacttagactggtgtcgacactagtgggatcccaggccccgtttgggctttcatacccccggcacattctggtggggtgctaaactcagattatagtgatacacattggttgaataatatatttatcagactataagctccatgaggccagagacttgtctactttgcttaccacagtattcccagtaactagcacagacctaccaaagactggctgctcaataatttaaagaataagtagagtgcagtgcaaggatgacatgcgcaaggtgtatatgaataaataaggaatcatacttagagatccaaggcgtcaggaaagacaatagagggaccatatctttaaccctagaaagatagtctgcgtaaaattgacgcatgcattcttgaaatattgctctctcttctaaaagcgcgaatcgcgcc

SEQ ID NO: 44 - DNA, 480 bp, synthetic construct
  source 1..480: mol_type = other DNA
ggcgtggctgaatgagactggtgtcgacactagtgggatcctagcccgctgctctccctggtctccgcctccaattccatcaccatgacacccaaggtggactttttggtttgccgttcctcacaggttgattgccacttccagcaaatgatggatcgtggctgaaatgagactggtgtcgacactagtgggatcagatggtgactcccaactggttcaccttccaacatttctgtttattaagcagacggcataaattaataaagaatatattcattcactgagcttctacaaagtgcgaggcattagaaaataaaacagacaaggtcccctattgcaagggacttccagaataaagtccaaatttcttagtctagcattcagtgttctctatgtatttaaccctagaaagatagtctgcgtaaaattgacgcatgcattcttgaaatattgctctctcgtctaaaagcgcgatcgtgc

SEQ ID NO: 45 - DNA, 642 bp, synthetic construct
  source 1..642: mol_type = other DNA
tgttctatggtggggagctttaccttcttgtgttggagaaatttttgggggtttattcggtgttttagcatctaaccccgatttttattactttgtgggttttgggggtccctttttcttttcgcctagtttttcccctttttgggggaaaaagggctggggttgcccctagggggattttcgacttgctccttttaacatttttataaatgccctttacatattggtgggggtcaagtttgtttgttgatattggttcccaaccctgcagggtcatgggtcatttttggaaattatttttttgttatgtttatgaagtatttttcctttcctccccctcccgggttttggtgcctgtttaaacttaacctttttaaaccgtcccctgggtttgttttgttgatgccctggctgttttcccagattttgttgttaattttttttggctgtttaagggggcccttttggggggttataaaactttgaaaaaaaggaaaatagatttggtcatttaacccttttccaaaggctgcaaaaaaaaaaaaaaatccagttgttttaaccctagaaagatagtctgcgtaaaattgacgcatgcattcttgaaatattgctctctctctaaatgcgcgattccgtggg

SEQ ID NO: 46 - DNA, 401 bp, synthetic construct
  source 1..401: mol_type = other DNA
ataatttttttttgtatttgttccccacccatcagaccaaacaacataaactggtctggtgactacgtaaggccaagagagaaaggagagatggagtcacacagatggtggctgaatgagactggtgtcgacactagtgggatcaacaggcagacttactaacacacacacacacatacacattcctgtatagactaaagacacaactaactcaaagtgactggataatctattaagctagcaggtcttatctacatttaaatgcatactctgcttttaagcaaactgttctaattttattgtggttgttggttccttaaccctagaaagatagtctgcgtaaaattgacgcatgcattcttgaaatattgctctctctctaaaagcgcgattccgcgggc

SEQ ID NO: 47 - DNA, 728 bp, synthetic construct
  source 1..728: mol_type = other DNA
aaaaataaaatattactcaaatttgtggcgagtaaagtaatatcaaaaacttggggggagttgcatacgaatcatagtggctgaaagagactggtgtcgacactagtgggatcacaccactgcactccaacctgggcaacagattgagactacatctaagaaaaaaaaaaattacaatacaacacacatacacacacacacctggaaactcaaagagtacgttcatactaaaagtttaacacaaacattcaactctgagacatggtctggttaagcagaagaactatgagacaaaaagaaagaattcctcagaaattcatgaagggaaggacaagcctccacatggggaaaaatcagctgacctcaggcttccccacagcacatgtgagccaggggatggtggaatgacagctgcaaagtgttggggaagaaaataaatctaagagtattatacccagccaagatatctctacattgttcaaagataaagaccatgggcagacattctcagacacaaaaaaacactcaggaaatactcgagtctttctgaaaaaacgactgataatgaaatctaggtgattaagagggacagcacaatgaacagagacataaatggtaaaaggactttggtgagcactgactgtatttaaccctagaaagatagtctgcgtaaaattgacgcatgcattcgtgaaatatgctctctcgtctacatgcgcgatcgtgcc

SEQ ID NO: 48 - DNA, 901 bp, synthetic construct
  source 1..901: mol_type = other DNA
cattacagaattgaaagaagagttttccactgcattgcgacggattctgttgatgtggtattcaggcccatatcgtttcataggtttctggcaacccgaacggacatttcgaagtcctgttaatcagaaaaactcggattaatcgacaaattcgatcgcacaaactagaaactaacaccagatctagatagaaatcacaagtcgaagagtaattattcgacaaaactcaaattatttgaaacaaatcggatgatatctatgaaaccctaatcgagaattaagatgatatctaacgatcaaacccagaaaatcgtcttcgatctaagattaacagaatctaaaccaaagaacatatacgaaattgggatcgaacgaaattggaatagaagaactggagtggttttgtgtggggcattgggggcgagaagggaatggggttgaccctagggggatcatgcccctgccctgcagcctgggtaacaaagcaagacctttttttgaaaaaaaaaaaaagtatatggaaggatgaatgcggagctgagagataataggttaacacccacactaaaaatgtagaaagaaattagtcccatgtttaggtctgtatctcacatcttaactcacaatacactaacttgcctcacaatactgcaaataggaacaaaagaagtggcacagtaatccaaaggcagtctgagttcaaccagagccctgctcaccaggtcattttattacacattggagaagcattctaagagattgctgagggtgttctaattgttttatctatgaaaaatgggctccttggaggccatgtgcaggccctagaaagatagtctgcgtaaaattgacgcatgcattcttgaaatattgctctctctctaaaagcgcgatcggtgct

SEQ ID NO: 49 - DNA, 923 bp, synthetic construct
  source 1..923: mol_type = other DNA
gcccaacccgaaattgctaatatcccagtaaagtgtgtaccactgaaaatttcttttgtctttgtgggaaaaggaaggactttgtgggaagtgtgaaggttggggattcttagaagatttttaaaaggaaataacaatctttaatatttttgctcatttttacaactatgtcaaaatggatacacattttacaagaatttgactttttacttgccacttaattgagagttttttaaagcatcaattgtggggtttggtaaaaattgacatatttcttccaagggaaaatatactgacctttgcaaggtgtcaaaggtaacagaactctgacaatagactaatctcagagactgattatctttaacatttatattccctgtatcaatagaaatgagaaggaaatgaatgagtctgaattttaaattcatcattttgtgtgggcatacgtggtcggggtctttggtcacttgtgcaagcacgggagaccccagagcacaggagggacctcatgtttaggaaagtgggagttgtttcgtgtcaaaactagtggcaaaaggagtatgatgctcccaggagagcaggaaagcatctatcagaagactcaagtgtactttctctgggctcataaccttcaacctctttgttttctctgaatcactctcaactttcttccaccacaatctaaggcaaggctgattttaaagtactttttcatttcccttttatttttaggaggttaccagaggcaaaggtaatcatgctctgatgaactgtaactcttcccaaatctcctaacctcttctaccttatgcatactagtttactctgccctttgcattaaccctagaaagatagtctgcgtaaaattgacgcatgcatttgtgaaatactgctctctcgttctacaagcgcgattcggtggc

SEQ ID NO: 50 - DNA, 20 bp, synthetic construct
  source 1..20: mol_type = other DNA
tcactcgtattacgtttaca

SEQ ID NO: 51 - DNA, 20 bp, synthetic construct
  source 1..20: mol_type = other DNA
tgccagattcagcaacggat

SEQ ID NO: 52 - DNA, 20 bp, synthetic construct
  source 1..20: mol_type = other DNA
gtcttcggagatggggatgc

SEQ ID NO: 53 - DNA, 21 bp, synthetic construct
  source 1..21: mol_type = other DNA
agtttttcctgcacgggtagt

SEQ ID NO: 54 - DNA, 19 bp, synthetic construct
  source 1..19: mol_type = other DNA
gcttaatgcgccgctacag

SEQ ID NO: 55 - DNA, 20 bp, synthetic construct
  source 1..20: mol_type = other DNA
acctgtatcgtggccattgg

SEQ ID NO: 56 - DNA, 19 bp, synthetic construct
  source 1..19: mol_type = other DNA
cgcttggtcggtcatttcg

SEQ ID NO: 57 - DNA, 419 bp, synthetic construct
  source 1..419: mol_type = other DNA
tttaacaaaaatttaacgcgaattaattaaggtcgggcaggaagagggcctatttcccatgattccttcatatttgcatatacgatacaaggctgttagagagataattagaattaatttgactgtaaacacaaagatattagtacaaaatacgtgacgtagaaagtaataatttcttgggtagtttgcagttttaaaattatgttttaaaatggactatcatatgcttaccgtaacttgaaagtatttcgatttcttggctttatatatcttgtggaaaggacgaaacaccgtcactcgtattacgtttacagttttagagctagaaatagcaagttaaaataaggctagtccgttatcaacttgaaaaagtggcaccgagtcggtgcttttttctagtataccgtcgacctctagct

SEQ ID NO: 58 - DNA, 1691 bp, synthetic construct
  source 1..1691: mol_type = other DNA
cttttctttgtttttcgcgatcgccacagtcctcttatcaacttattatcatatgcttaccatgtattccatcagttctccacaactcattccattgttcccattatttcttacattaattgtgatcttttgagatagtcactttagtactagaaagatcttttcttggtactctgacattttagagctgtctgactcgtgactgaactattaatatatatattgcattcaccagcttagtgtttctctcttgaaacagtagacatattcagttcttaaagttttgcctaacctcatccatgagcacaaatgtgtcatactgatgaataatgtgttggtacaattctttacttggtcatatcttcatgagattatctttgaaaaatctcttcttgtctattaatcctttcagatagcctgtaatattttaagaacttttaaggtcatcacaagtgatcactacttttgtttttcataggcaccgatccatatatttgcaaatttataatttcaaagccttttgtactgacctaaaatggatgatagtgaaaacagagattgacaacttctatgttcactaatacttccagcttacctaagaaacatatagtgaattaaaaatttgccatatgtattcagtacattggttttaagaaatggcagctcagtgtttgagctctccactgtggcagttggcaggtttcatgactagaagggctcgtttgagcttgtcatcgtaatatttaaacatgttggcaagaacatcccgttttcaaacatgtagatgcactagttcaatatgtctgctatctcttcattcaggacgtgagttatgcatcaaggttttttaaaaattgggtttaagtatacgggtaggtaggtaattttgaagatagcaatcaagaggtgatatctgtagtatctgttcctgttgcatggctttattgtggtttgagctgtcagtaatcactagcctttgaacttctgtagaatagtaatgcctcttagcctccattgtgatgtctgtgttgtgttgtacattaagagcggtgatgaattttgaactgtaaagatgtcgttattctaaggaaacacataagaattacactaaagccttcttaattaaacgtgaaagggatgggcagaagaacttcaaattgtgtgacatgaaatcattaatttggttaaaaactaataaataaagcagcttgtctgctctaaatatttggattagattctgctgtagataaatgtaccctgtattagtcaggaaggcaccctggtgttatgacaagagcactggatcaaacatcatttgtgtatctgtggacctggctgtatgacttggggacagttatttaaactctttgaaccatctcatttttcttattcagaaaatggggacaacagcaattctatgtacttccctggacgattgggagaattaaaccaagcatatgtgaaaaggcatttggaaaagcataaggagccatatgtacgtgaagtattcttgaaactatgcttatgtataattcaactcttttgagatcaatatacaactcaaaactagaaagggggtaaaaaagaccatctgccctgagacaatttactgccacttgaggttcaacagaattcacaaatgcttaccttcagtgggttttgagtgaagacctgcaggtgtttttcctgaa

SEQ ID NO: 59 - DNA, 7828 bp, synthetic construct
  source 1..7828: mol_type = other DNA
ccagaaatttatccttaaggtcgtttagatctctcgactctggctctatcgaatctccgtcgtttcgagcttacgcgaacagccgtggcgctcatttgctcgtcgggcatcgaatctcgtcagctatcgtcagcttacctttttggcattaaccctagaaagatagtctgcgtaaaattgacgcatgcattcttgaaatattgctctctctttctaaatagcgcgaatccgtcgctgtgcatttaggacatctcagtcgccgcttggagctcccgtgaggcgtgcttgtcaatgcggtaagtgtcactgattttgaactataacgaccgcgtgagtcaaaatgacgcatgattatcttttacgtgacttttaagatttaactcatacgataattatattgttatttcatgttctacttacgtgataacttattatatatatattttcttgttatagatatcagcgatcgctgctttctccctggtaccgggtaggggaggcgcttttcccaaggcagtctggagcatgcgctttagcagccccgctgggcacttggcgctacacaagtggcctctggcctcgcacacattccacatccaccggtaggcgccaaccggctccgttctttggtggccccttcgcgccaccttctactcctcccctagtcaggaagttcccccccgccccgcagctcgcgtcgtgcaggacgtgacaaatggaagtagcacgtctcactagtctcgtgcagatggacagcaccgctgagcaatggaagcgggtaggcctttggggcagcggccaatagcagctttgctccttcgctttctgggctcagaggctgggaaggggtgggtccgggggcgggctcaggggcgggctcaggggcggggcgggcgcccgaaggtcctccggaggcccggcattctgcacgcttcaaaagcgcacgtctgccgcgctgttctcctcttcctcatctccgggcctttcgacctcacggtgttgccaaaatgtcgctttccaacaagctgactttggacaagctggacgtgaaggggaagcggggtgatgaggtaattccgtactgctgccctcaagccctcggggccacattctctctggctgctttctctgacctgcattctctcccctgggcctgtgccgctttctgtctgcagcttgtggcctgggtcacctctacggctggcccagatccttccctgccgcctccttcaggttccgtcttcctccactccctcttccccttgctctctgctgtgttgctgcccaaggatgctctttccggagcacttccttctcggcgctgcaccacgtgatgtcctctgagccgatcctccccgtgtctgggtcctctccgggcatctctcctccctcacccaaccccatgccgtcttcactcgctgggttcccttttccttctccttctggggcctgtgccatctctcgtttcttaggatggccttctccgacggatgtctcccttgcgtcccgcctccccttcttgtaggcctgcatcatcaccgtttttctggacaaccccaaagtaccccgtctccctggctttagccacctctccatcctcttgctttctttgcctggacaccccgttctcctgtggattcgggtcacctctcactcctttcatttgggcagctcccctaccccccttacctctctagtctgtgcaagctcttccagccccctgtcatggcatcttccaggggtccgagagctcagctagtcttcttcctccaacccggacccctatgtccacttcaggacagcatgtttgctgcctccaggcatcctgtgtccccgagctgggaccaccttatattcccagggccggttaatgtggctctggttctgggtacttttatctgtcccctccaccccacagtggggccactagggacaggattggtgacagaaaacccgggataacttcgtataatgtatgctatacgaagttatctctctctcttagggataacagggtaatgggcccgccccatccttaggcctcctccttcctagtctcctgatattgggtctaacccccacctcctgttaggcagattccttatctggtgacacacccccatttcctggagccatctctctccttgccagaacctctaaggtttgcttacgatggagccagagaggatcctgggagggagagcttggcagggggtgggagggaagggggggatgcgtgacctgcccggttctcagtggccaccctgcgctaccctctcccagaacctgagctgctctgacgcggctgtctggtgcgtttcactgatcctggtgctgcagcttccttacacttcccaagaggagaagcagtttggaaaaacaaaatcagaataagttggtcctgagttctaactttggctcttcacctttctagtccccaatttatattgttcctccgtgcgtcagttttacctgtgagataaggccagtagccagccccgtcctggcagggctgtggtgaggaggggggtgtccgtgtggaaaactccctttgtgagaatggtgcgtcctaggtgttcaccaggtcgtggccgcctctactccctttctctttctccatccttctttccttaaagagtccccagtgctatctgggacatattcctccgcccagagcagggtcccgcttccctaaggccctgctctgggcttctgggtttgagtccttggcaagcccaggagaggcgctcaggcttccctgtcccccttcctcgtccaccatctcatgcccctggctctcctgccccttccctacaggggttcctggctctgctctgaattcagctatcctgcaggtggcctccgcgccgggttttggcgcctcccgcgggcgcccccctcgtcacggcgagcgctgccacgtcagacgaagggcgcaggagcgtcctgatccttccgcccggacgctcaggacagcggcccgctgctcataagactcggccttagaaccccagtatcagcagaaggacattttaggacgggacttgggtgactctagggcactggttttctttccagagagcggaacaggcgaggaaaagtagtcccttctcggcgattctgcggagggatctccgtggggcggtgaacgccgatgattatataaggacgcgccgggtgtggcacagctagttccgtcgcagccgggatttgggtcgcggttcttgtttgtggatcgctgtgatcgtcacttggtgagtagcgggctgctgggctggccggggctttcgtggccgccgggccgctcggtgggacggaagcgtgtggagagaccgccaagggctgtagtctgggtccgcgagcaaggttgccctgaactgggggttggggggagcgcagcaaaatggcggctgttcccgagtcttgaatggaagacgcttgtgaggcgggctgtgaggtcgttgaaacaaggtggggggcatggtgggcggcaagaacccaaggtcttgagcccttcgctaatgcgggaaagctcttattcgggtgagatgggctgggcaccatctggggaccctgacgtgaagtttgtcactgactggagaactcggtttgtcgtctgttgcgggggcggcagttatggcggtgccgttgggcagtgcacccgtacctttgggagcgcgcgccctcgtcgtgtcgtgacgtcacccgttctgttggcttataatgcagggtggggccacctgccggtaggtgtgcggtaggcttttctccgtcgcaggacgcagggttcgggcctagggtaggctctcctgaatcgacaggcgccggacctctggtgaggggagggataagtgaggcgtcagtttctttggtcggttttatgtacctatcttcttaagtagctgaagctccggttttgaactatgcgctcggggttggcgagtgtgttttgtgaagttttttaggcaccttttgaaatgtaatcatttgggtcaatatgtaattttcagtgttagacttgtaaattgtccgctaaattctggccgtttttggcttttttgttagacaacatgaccgagtacaagcccacggtgcgcctcgccacccgcgacgacgtccccagggccgtacgcaccctcgccgccgcgttcgccgactaccccgccacgcgccacaccgtcgatccggaccgccacatcgagcgggtcaccgagctgcaagaactcttcctcacgcgcgtcgggctcgacatcggcaaggtgtgggtcgcggacgacggcgccgcggtggcggtctggaccacgccggagagcgtcgaagcgggggcggtgttcgccgagatcggcccgcgcatggccgagttgagcggttcccggctggccgcgcagcaacagatggagggcctcctggcgccgcaccggcccaaggagcccgcgtggttcctggccaccgtcggcgtctcgcccgaccaccagggcaagggtctgggcagcgccgtcgtgctccccggagtggaggccgccgagcgcgccggggtgcccgccttcctggagacctccgcgccccgcaacctccccttctacgagcggctcggcttcaccgtcaccgccgacgtcgaggtgcccgaaggaccgcgcacctggtgcatgacccgcaagcccggtgcctaggctagtatgtaagcctagtcttagataataaaatcgctatccatcgaagatggatgtgtgttggttttttgtgtgattaataggattggtgacagaaaagccccatccttaggcctcctccttcctagtctcctgatattgggtctaacccccacctcctgttaggcagattccttatctggtgacacacccccatttcctggagccatctctctccttgccagaacctctaaggtttgcttacgatggagccagagaggatccgaacctgagctgctctgacgcggccgataacttcgtataaagtatcctatacgaagttatcctgcaggcgatctctcgatctctcgatttcgatcaagacattcctttaatggtcttttctggacaccactaggggtcagaagtagttcatcaaactttcttccctccctaatctcattggttaccttgggctatcgaaactaaaagttttgttactttatagaagaaattttgagtttttgtttttttttaataaataaataaacataaataaattgtttgttgaatttattattagtatgtaagtgtaaatataataaaacttaatatctattcaaattaataaataaacctcgatatacagaccgataaaacacatgcgtcaattttacgcatgattatctttaacgtacgtcacaatatgattatctttctagggttaattaaccagtcaagtcagctacttggcgagatcgacttgtctgggtttcgactacgctcagaattgcgtcagtcaagttcgatctggtccttgctattgcacccgttctccgattacgagtttcatttaaatcatgtgagcaaaaggccagcaaaaggccaggaaccgtaaaaaggccgcgttgctggcgtttttccataggctccgcccccctgacgagcatcacaaaaatcgacgctcaagtcagaggtggcgaaacccgacaggactataaagataccaggcgtttccccctggaagctccctcgtgcgctctcctgttccgaccctgccgcttaccggatacctgtccgcctttctcccttcgggaagcgtggcgctttctcatagctcacgctgtaggtatctcagttcggtgtaggtcgttcgctccaagctgggctgtgtgcacgaaccccccgttcagcccgaccgctgcgccttatccggtaactatcgtcttgagtccaacccggtaagacacgacttatcgccactggcagcagccactggtaacaggattagcagagcgaggtatgtaggcggtgctacagagttcttgaagtggtggcctaactacggctacactagaagaacagtatttggtatctgcgctctgctgaagccagttaccttcggaaaaagagttggtagctcttgatccggcaaacaaaccaccgctggtagcggtggtttttttgtttgcaagcagcagattacgcgcagaaaaaaaggatctcaagaagatcctttgatcttttctacggggtctgacgctcagtggaacgaaaactcacgttaagggattttggtcatgagattatcaaaaaggatcttcacctagatccttttaaattaaaaatgaagttttaaatcaatctaaagtatatatgagtaaacttggtctgacagttaccaatgcttaatcagtgaggcacctatctcagcgatctgtctatttcgttcatccatagttgcatttaaatttccgaactctccaaggccctcgtcggaaaatcttcaaacctttcgtccgatccatcttgcaggctacctctcgaacgaactatcgcaagtctcttggccggccttgcgccttggctattgcttggcagcgcctatcgccaggtattactccaatcccgaatatccgagatcgggatcacccgagagaagttcaacctacatcctcaatcccgatctatccgagatccgaggaatatcgaaatcggggcgcgcctggtgtaccgagaacgatcctctcagtgcgagtctcgacgatccatatcgttgcttggcagtcagccagtcggaatccagcttgggacccaggaagtccaatcgtcagatattgtactcaagcctggtcacggcagcgtaccgatctgtttaaacctagatattgatagtctgatcggtcaacgtataatcgagtcctagcttttgcaaacatctatcaagagacaggatcagcaggaggctttcgcatgattgaacaagatggattgcacgcaggttctccggcggcttgggtggagaggctattcggctatgactgggcacaacagacaatcggctgctctgatgccgccgtgttccggctgtcagcgcaggggcgtccggttctttttgtcaagaccgacctgtccggtgccctgaatgaactgcaagacgaggcagcgcggctatcgtggctggcgacgacgggcgttccttgcgcggctgtgctcgacgttgtcactgaagcgggaagggactggctgctattgggcgaagtgccggggcaggatctcctgtcatctcaccttgctcctgccgagaaagtatccatcatggctgatgcaatgcggcggctgcatacgcttgatccggctacctgcccattcgaccaccaagcgaaacatcgcatcgagcgagcacgtactcggatggaagccggtcttgtcgatcaggatgatctggacgaagagcatcaggggctcgcgccagccgaactgttcgccaggctcaaggcgtctatgcccgacggcgaggatctcgtcgtgacccacggcgatgcctgcttgccgaatatcatggtggaaaatggccgcttttctggattcatcgactgtggccgtctgggtgtggcggaccgctatcaggacatagcgttggctacccgtgatattgctgaagagcttggcggcgaatgggctgaccgcttccttgtgctttacggtatcgccgcgcccgattcgcagcgcatcgccttctatcgccttcttgacgagttcttctgaccgattctaggtgcattggcgcagaaaaaaatgcctgatgcgacgctgcgcgtcttatactcccacatatgccagattcagcaacggatacggcttccccaacttgcccacttccatacgtgtcctcctta

SEQ ID NO: 60 - DNA, 20 bp, synthetic construct
  source 1..20: mol_type = other DNA
ctttgttttttcgcgatcgc

SEQ ID NO: 61 - DNA, 25 bp, synthetic construct
  source 1..25: mol_type = other DNA
aaaaccttgatgcataactcacgtc

SEQ ID NO: 62 - DNA, 26 bp, synthetic construct
  source 1..26: mol_type = other DNA
attgggtttaagtatacgggtaggta

SEQ ID NO: 63 - DNA, 21 bp, synthetic construct
  source 1..21: mol_type = other DNA
ttcaggaaaaacacctgcagg

SEQ ID NO: 64 - DNA, 10341 bp, synthetic construct
  source 1..10341: mol_type = other DNA
gcgatcgccacagtcctcttatcaacttattatcatatgcttaccatgtattccatcagttctccacaactcattccattgttcccattatttcttacattaattgtgatcttttgagatagtcactttagtactagaaagatcttttcttggtactctgacattttagagctgtctgactcgtgactgaactattaatatatatattgcattcaccagcttagtgtttctctcttgaaacagtagacatattcagttcttaaagttttgcctaacctcatccatgagcacaaatgtgtcatactgatgaataatgtgttggtacaattctttacttggtcatatcttcatgagattatctttgaaaaatctcttcttgtctattaatcctttcagatagcctgtaatattttaagaacttttaaggtcatcacaagtgatcactacttttgtttttcataggcaccgatccatatatttgcaaatttataatttcaaagccttttgtactgacctaaaatggatgatagtgaaaacagagattgacaacttctatgttcactaatacttccagcttacctaagaaacatatagtgaattaaaaatttgccatatgtattcagtacattggttttaagaaatggcagctcagtgtttgagctctccactgtggcagttggcaggtttcatgactagaagggctcgtttgagcttgtcatcgtaatatttaaacatgttggcaagaacatcccgttttcaaacatgtagatgcactagttcaatatgtctgctatctcttcattcaggacgtgagttatgcatcttctgacctcttctcttcctcccacagggcatggcaaaacctctgagccaggaagaaagcacactgattgaaagagcaaccgctactatcaacagcatccccatctccgaagactattctgtggctagtgccgctctgtccagcgacgggagaatcttcaccggtgtgaacgtctaccactttacaggcggaccatgcgcagagctggtggtcctggggactgcagccgctgcagccgctggtaatctgacctgtatcgtggccattggcaacgaaaataggggcatcctgtccccatgcggcaggtgtcggcaggtgctgctggatctgcatcctggcatcaaggcaattgtcaaagactctgatggacagcctaccgccgtcggtatccgtgaactgctgcctagcggctatgtctgggagggataatgagcttggcttcgaaatgaccgaccaagcgacgcccaacctgccatcacgagatttcgattccaccgccgccttctatgaaaggttgggcttcggaatcgttttccgggacgccggctggatgatcctccagcgcggggatctcatgctggagttcttcgcccaccccaacttgtttattgcagcttataatggttacaaataaagcaatagcatcacaaatttcacaaataaagcatttttttcactgcattctagttgtggagatctcgtgaggctccggtgcccgtcagtgggcagagcgcacatcgcccacagtccccgagaagttggggggaggggtcggcaattgaaccggtgcctagagaaggtggcgcggggtaaactgggaaagtgatgtcgtgtactggctccgcctttttcccgagggtgggggagaaccgtatataagtgcactagtcgccgtgaacgttctttttcgcaacgggtttgccgccagaacacaggtaagtgccgtgtgtggttcccgcgggcctggcctctttacgggttatggcccttgcgtgccttgaattacttccacctggctgcagtacgtgattcttgatcccgagcttcgggttggaagtgggtgggagagttcgtggccttgcgcttaaggagccccttcgcctcgtgcttgagttgtggcctggcctgggcgctggggccgccgcgtgcgaatctggtggcaccttcgcgcctgtctcgctgctttcgataagtctctagccatttaaaatttttgatgacctgctgcgacgctttttttctggcaagatagtcttgtaaatgcgggccaagatcagcacactggtatttcggtttttggggccgcgggcggcgacggggcccgtgcgtcccagcgcacatgttcggcgaggcggggcctgcgagcgcggccaccgagaatcggacgggggtagtctcaagctgcccggcctgctctggtgcctggcctcgcgccgccgtgtatcgccccgccctgggcggcaaggctggcccggtcggcaccagttgcgtgagcggaaagatggccgcttcccggccctgctgcagggagcacaaaatggaggacgcggcgctcgggagagcgggcgggtgagtcacccacacaaaggaaaagggcctttccgtcctcagccgtcgcttcatgtgactccacggagtaccgggcgccgtccaggcacctcgattagttctccagcttttggagtacgtcgtctttaggttggggggaggggttttatgcgatggagtttccccacactgagtgggtggagactgaagttaggccagcttggcacttgatgtaattctccttggaatttgccctttttgagtttggatcttggttcattctcaagcctcagacagtggttcaaagtttttttcttccatttcaggtgtcgtgaaaactacccctaaaagccaaaagatccggagtggccaccatgagggcctggatcttctttctcctttgcctggccgggagggctctggcagctagcgacatccagatgacacagagccctagcagcctgtctgccagcgtgggagacagagtgaccatcacatgcaaggccagccaggatgtgtctacagccgtggcctggtatcagcagaagcctggaaaggcccctaagctgctgatctacagcgccagctacagatacaccggcgtgcccagcagattttctggcagcggctctggcaccgacttcaccttcaccataagcagcctgcagcctgaggatatcgccacctactactgccagcagcggtacagcacccctagaacatttggccagggcaccaagctggaaatcaagcgtaccgcggccgccccttccgtgttcatcttccctccctccgacgagcagctgaagtccggcaccgcctctgtggtgtgcctgctgaacaacttctaccctcgggaggccaaggtgcagtggaaggtggacaacgccctgcagtccggcaactcccaggaatccgtcaccgagcaggactccaaggactctacctactccctgtcctccaccctgaccctgtccaaggccgactacgagaagcacaagctgtacgcctgcgaagtgacccaccagggcctgtcctctcccgtgaccaagtccttcaaccggggcgagtgctaataaaagcttacgacgtgatcagcctcgactgtgccttctagttgccagccatctgttgtttgcccctcccccgtgccttccttgaccctggaaggtgccactcccactgtcctttcctaataaaatgaggaaattgcatcgcattgtctgagtaggtgtcattctattctggggggtggggtggggcaggacagcaagggggaggattgggaagacaatagcaggcatgctggggacgatcgtcagctggatctagtaatcaattacggggtcattagttcatagcccatatatggagttccgcgttacataacttacggtaaatggcccgcctggctgaccgcccaacgacccccgcccattgacgtcaataatgacgtatgttcccatagtaacgccaatagggactttccattgacgtcaatgggtggagtatttacggtaaactgcccacttggcagtacatcaagtgtatcatatgccaagtacgccccctattgacgtcaatgacggtaaatggcccgcctggcattatgcccagtacatgaccttatgggactttcctacttggcagtacatctacgtattagtcatcgctattaccatgctgatgcggttttggcagtacatcaatgggcgtggatagcggtttgactcacggggatttccaagtctccaccccattgacgtcaatgggagtttgttttggcaccaaaatcaacgggactttccaaaatgtcgtaacaactccgccccattgacgcaaatgggcggtaggcgtgtacggtgggaggtctatataagcagagctggtttagtgaaccgtcagatcagatccatcgattggccaccatgagttggagctgtatcatcctcttcttggtagcaacagctacaggtaaggggttaacagtagcaggcttgaggtctggacatatatatgggtgacaatgacatccactttgcctttctctccacaggcgccatggcccaggttcagctggttcagtctggcgccgaagtgaagaaacctggcgcctctgtgaaggtgtcctgcaaggccagcggctacacctttaccagctactacatgcactgggtccgacaggcccctggacaaggacttgagtggatgggcgagatcaaccctagcggcggcaggaccaactacaacgagaagttcaagagccgcgtgaccatgaccagagacaccagcacctccaccgtgtacatggaactgagcagcctgagaagcgaggacaccgccgtgtactactgtgccagagaaagacccctgtacgctatggactattggggccagggcaccaccgtgacagtctcgagtgcctccaccaagggccctagcgtctttcctctggccccttcctccaagtctacctctggcggcaccgctgctctgggctgcctggtgaaggactacttccctgagcctgtgaccgtgtcctggaactctggcgccctgacctccggcgtgcataccttccctgccgtcctccagtcctccggcctgtactccctgtcctccgtggtgaccgtgccttcctcctctctgggcacccagacctacatctgcaacgtgaaccacaagccttccaacaccaaggtggacaagaaggtggagcctaagtcctgcgacaagacccacacctgccctccatgtcctgcccctgagctgctgggcggaccctccgtgttcctgttccctcctaagcctaaggacaccctgatgatctcccggacccctgaagtgacctgcgtggtggtggacgtgtcccacgaagatcctgaagtgaagttcaattggtacgtggacggcgtggaggtgcacaacgccaagaccaagcctcgggaggaacagtacaactccacctaccgggtggtgtctgtgctgaccgtgctgcaccaggactggctgaacggcaaagaatacaagtgcaaggtgtccaacaaggccctgcctgcccctatcgaaaagaccatctccaaggctaagggccagccacgggaacctcaggtctacacactgcctcctagccgggacgagctgaccaagaaccaggtgtccctgacctgtctggtgaagggcttctacccttccgatatcgccgtggagtgggagtctaacggccagcctgagaacaactacaagaccacccctcctgtgctggactccgacggctccttcttcctgtactccaagctgaccgtggacaagtcccggtggcagcagggcaacgtgttctcctgctccgtgatgcacgaggccctgcacaaccactacacccagaagtccctgtccctgtctcctggcaaggaacaaaaactcatctcagaagaggatctgaatgctgtgggccaggacacgcaggaggtcatcgtggtgccacactccttgccctttaaggtggtggtgatctcagccatcctggccctggtggtgctcaccatcatctcccttatcatcctcatcatgctttggcagaagaagccacgttagtaaaagcttgtcacttggaaagtaatagtttttcctgcacgggtagtaatcagcctcgactgtgccttctagttgccagccatctgttgtttgcccctcccccgtgccttccttgaccctggaaggtgccactcccactgtcctttcctaataaaatgaggaaattgcatcgcattgtctgagtaggtgtcattctattctggggggtggggtggggcaggacagcaagggggaggattgggaagacaatagcaggcatgctggggatggcccgggcatgataacttcgtataatgtatgctatacgaagttatgtatacgggtaggtaggtaattttgaagatagcaatcaagaggtgatatctgtagtatctgttcctgttgcatggctttattgtggtttgagctgtcagtaatcactagcctttgaacttctgtagaatagtaatgcctcttagcctccattgtgatgtctgtgttgtgttgtacattaagagcggtgatgaattttgaactgtaaagatgtcgttattctaaggaaacacataagaattacactaaagccttcttaattaaacgtgaaagggatgggcagaagaacttcaaattgtgtgacatgaaatcattaatttggttaaaaactaataaataaagcagcttgtctgctctaaatatttggattagattctgctgtagataaatgtaccctgtattagtcaggaaggcaccctggtgttatgacaagagcactggatcaaacatcatttgtgtatctgtggacctggctgtatgacttggggacagttatttaaactctttgaaccatctcatttttcttattcagaaaatggggacaacagcaattctatgtacttccctggacgattgggagaattaaaccaagcatatgtgaaaaggcatttggaaaagcataaggagccatatgtacgtgaagtattcttgaaactatgcttatgtataattcaactcttttgagatcaatatacaactcaaaactagaaagggggtaaaaaagaccatctgccctgagacaatttactgccacttgaggttcaacagaattcacaaatgcttaccttcagtgggttttgagtgaagacctgcaggcgatctctcgatctctcgatttcgatcaagacattcctttaatggtcttttctggacaccactaggggtcagaagtagttcatcaaactttcttccctccctaatctcattggttaccttgggctatcgaaacttaattaagccacctgacgcgccctgtagcggcgcattaagcgcggcgggtgtggtggttacgcgcagcgtgaccgctacacttgccagcgccctagcgcccgctcctttcgctttcttcccttcctttctcgccacgttcgccggctttccccgtcaagctctaaatcgggggctccctttagggttccgatttagtgctttacggcacctcgaccccaaaaaacttgattagggtgatggttcacgtagtgggccatcgccctgatagacggtttttcgccctttgacgttggagtccacgttctttaatagtggactcttgttccaaactggaacaacactcaaccctatctcggtctattcttttgatttataagggattttgccgatttcggcctattggttaaaaaatgagctgatttaacaaaaatttaacgcgaattttaacaaaatattaacgcttacaatttacgcgttaagatacattgatgagtttggacaaaccacaactagttaattaaccagtcaagtcagctacttggcgagatcgacttgtctgggtttcgactacgctcagaattgcgtcagtcaagttcgatctggtccttgctattgcacccgttctccgattacgagtttcatttaaatcatgtgagcaaaaggccagcaaaaggccaggaaccgtaaaaaggccgcgttgctggcgtttttccataggctccgcccccctgacgagcatcacaaaaatcgacgctcaagtcagaggtggcgaaacccgacaggactataaagataccaggcgtttccccctggaagctccctcgtgcgctctcctgttccgaccctgccgcttaccggatacctgtccgcctttctcccttcgggaagcgtggcgctttctcatagctcacgctgtaggtatctcagttcggtgtaggtcgttcgctccaagctgggctgtgtgcacgaaccccccgttcagcccgaccgctgcgccttatccggtaactatcgtcttgagtccaacccggtaagacacgacttatcgccactggcagcagccactggtaacaggattagcagagcgaggtatgtaggcggtgctacagagttcttgaagtggtggcctaactacggctacactagaagaacagtatttggtatctgcgctctgctgaagccagttaccttcggaaaaagagttggtagctcttgatccggcaaacaaaccaccgctggtagcggtggtttttttgtttgcaagcagcagattacgcgcagaaaaaaaggatctcaagaagatcctttgatcttttctacggggtctgacgctcagtggaacgaaaactcacgttaagggattttggtcatgagattatcaaaaaggatcttcacctagatccttttaaattaaaaatgaagttttaaatcaatctaaagtatatatgagtaaacttggtctgacagttaccaatgcttaatcagtgaggcacctatctcagcgatctgtctatttcgttcatccatagttgcatttaaatttccgaactctccaaggccctcgtcggaaaatcttcaaacctttcgtccgatccatcttgcaggctacctctcgaacgaactatcgcaagtctcttggccggccttgcgccttggctattgcttggcagcgcctatcgccaggtattactccaatcccgaatatccgagatcgggatcacccgagagaagttcaacctacatcctcaatcccgatctatccgagatccgaggaatatcgaaatcggggcgcgcctggtgtaccgagaacgatcctctcagtgcgagtctcgacgatccatatcgttgcttggcagtcagccagtcggaatccagcttgggacccaggaagtccaatcgtcagatattgtactcaagcctggtcacggcagcgtaccgatctgtttaaacctagatattgatagtctgatcggtcaacgtataatcgagtcctagcttttgcaaacatctatcaagagacaggatcagcaggaggctttcgcatgattgaacaagatggattgcacgcaggttctccggcggcttgggtggagaggctattcggctatgactgggcacaacagacaatcggctgctctgatgccgccgtgttccggctgtcagcgcaggggcgtccggttctttttgtcaagaccgacctgtccggtgccctgaatgaactgcaagacgaggcagcgcggctatcgtggctggcgacgacgggcgttccttgcgcggctgtgctcgacgttgtcactgaagcgggaagggactggctgctattgggcgaagtgccggggcaggatctcctgtcatctcaccttgctcctgccgagaaagtatccatcatggctgatgcaatgcggcggctgcatacgcttgatccggctacctgcccattcgaccaccaagcgaaacatcgcatcgagcgagcacgtactcggatggaagccggtcttgtcgatcaggatgatctggacgaagagcatcaggggctcgcgccagccgaactgttcgccaggctcaaggcgtctatgcccgacggcgaggatctcgtcgtgacccacggcgatgcctgcttgccgaatatcatggtggaaaatggccgcttttctggattcatcgactgtggccgtctgggtgtggcggaccgctatcaggacatagcgttggctacccgtgatattgctgaagagcttggcggcgaatgggctgaccgcttccttgtgctttacggtatcgccgcgcccgattcgcagcgcatcgccttctatcgccttcttgacgagttcttctgaccgattctaggtgcattggcgcagaaaaaaatgcctgatgcgacgctgcgcgtcttatactcccacatatgccagattcagcaacggatacggcttccccaacttgcccacttccatacgtgtcctccttaccagaaatttatccttaaggtcgtttaaactcgactctggctctatcgaatctccgtcgtttcgagcttacgcgaacagccgtggcgctcatttgctcgtcgggcatcgaatctcgtcagctatcgtcagcttacctttttggca

SEQ ID NO: 65 - DNA, 10341 bp, synthetic construct
  source 1..10341: mol_type = other DNA
gcgatcgccacagtcctcttatcaacttattatcatatgcttaccatgtattccatcagttctccacaactcattccattgttcccattatttcttacattaattgtgatcttttgagatagtcactttagtactagaaagatcttttcttggtactctgacattttagagctgtctgactcgtgactgaactattaatatatatattgcattcaccagcttagtgtttctctcttgaaacagtagacatattcagttcttaaagttttgcctaacctcatccatgagcacaaatgtgtcatactgatgaataatgtgttggtacaattctttacttggtcatatcttcatgagattatctttgaaaaatctcttcttgtctattaatcctttcagatagcctgtaatattttaagaacttttaaggtcatcacaagtgatcactacttttgtttttcataggcaccgatccatatatttgcaaatttataatttcaaagccttttgtactgacctaaaatggatgatagtgaaaacagagattgacaacttctatgttcactaatacttccagcttacctaagaaacatatagtgaattaaaaatttgccatatgtattcagtacattggttttaagaaatggcagctcagtgtttgagctctccactgtggcagttggcaggtttcatgactagaagggctcgtttgagcttgtcatcgtaatatttaaacatgttggcaagaacatcccgttttcaaacatgtagatgcactagttcaatatgtctgctatctcttcattcaggacgtgagttatgcatcttctgacctcttctcttcctcccacagggcatggcaaaacctctgagccaggaagaaagcacactgattgaaagagcaaccgctactatcaacagcatccccatctccgaagactattctgtggctagtgccgctctgtccagcgacgggagaatcttcaccggtgtgaacgtctaccactttacaggcggaccatgcgcagagctggtggtcctggggactgcagccgctgcagccgctggtaatctgacctgtatcgtggccattggcaacgaaaataggggcatcctgtccccatgcggcaggtgtcggcaggtgctgctggatctgcatcctggcatcaaggcaattgtcaaagactctgatggacagcctaccgccgtcggtatccgtgaactgctgcctagcggctatgtctgggagggataatgagcttggcttcgaaatgaccgaccaagcgacgcccaacctgccatcacgagatttcgattccaccgccgccttctatgaaaggttgggcttcggaatcgttttccgggacgccggctggatgatcctccagcgcggggatctcatgctggagttcttcgcccaccccaacttgtttattgcagcttataatggttacaaataaagcaatagcatcacaaatttcacaaataaagcatttttttcactgcattctagttgtggagatctcgtgaggctccggtgcccgtcagtgggcagagcgcacatcgcccacagtccccgagaagttggggggaggggtcggcaattgaaccggtgcctagagaaggtggcgcggggtaaactgggaaagtgatgtcgtgtactggctccgcctttttcccgagggtgggggagaaccgtatataagtgcactagtcgccgtgaacgttctttttcgcaacgggtttgccgccagaacacaggtaagtgccgtgtgtggttcccgcgggcctggcctctttacgggttatggcccttgcgtgccttgaattacttccacctggctgcagtacgtgattcttgatcccgagcttcgggttggaagtgggtgggagagttcgtggccttgcgcttaaggagccccttcgcctcgtgcttgagttgtggcctggcctgggcgctggggccgccgcgtgcgaatctggtggcaccttcgcgcctgtctcgctgctttcgataagtctctagccatttaaaatttttgatgacctgctgcgacgctttttttctggcaagatagtcttgtaaatgcgggccaagatcagcacactggtatttcggtttttggggccgcgggcggcgacggggcccgtgcgtcccagcgcacatgttcggcgaggcggggcctgcgagcgcggccaccgagaatcggacgggggtagtctcaagctgcccggcctgctctggtgcctggcctcgcgccgccgtgtatcgccccgccctgggcggcaaggctggcccggtcggcaccagttgcgtgagcggaaagatggccgcttcccggccctgctgcagggagcacaaaatggaggacgcggcgctcgggagagcgggcgggtgagtcacccacacaaaggaaaagggcctttccgtcctcagccgtcgcttcatgtgactccacggagtaccgggcgccgtccaggcacctcgattagttctccagcttttggagtacgtcgtctttaggttggggggaggggttttatgcgatggagtttccccacactgagtgggtggagactgaagttaggccagcttggcacttgatgtaattctccttggaatttgccctttttgagtttggatcttggttcattctcaagcctcagacagtggttcaaagtttttttcttccatttcaggtgtcgtgaaaactacccctaaaagccaaaagatccggagtggccaccatgagggcctggatcttctttctcctttgcctggccgggagggctctggcagctagcgacatccagatgacacagagccctagcagcctgtctgccagcgtgggagacagagtgaccatcacctgtagagccagccagggcatctcttctgccctggcatggtatcagcagaagcctggcaaggcccctaagctgctgatctacagcgccagctacagatacaccggcgtgcccagcagattttctggcagcggctctggcaccgacttcaccttcaccataagcagcctgcagcctgaggatatcgccacctactactgccagcagcggtactctctgtggcggacatttggccagggcaccaagctggaaatcaagcgtaccgcggccgcaccttccgtgttcatcttccctccctccgacgagcagctgaagtccggcaccgcctctgtggtgtgcctgctgaacaacttctaccctcgggaggccaaggtgcagtggaaggtggacaacgccctgcagtccggcaactcccaggaatccgtcaccgagcaggactccaaggactctacctactccctgtcctccaccctgaccctgtccaaggccgactacgagaagcacaagctgtacgcctgcgaagtgacccaccagggcctgtcctctcccgtgaccaagtccttcaaccggggcgagtgctaataaggatccacgacgtgatcagcctcgactgtgccttctagttgccagccatctgttgtttgcccctcccccgtgccttccttgaccctggaaggtgccactcccactgtcctttcctaataaaatgaggaaattgcatcgcattgtctgagtaggtgtcattctattctggggggtggggtggggcaggacagcaagggggaggattgggaagacaatagcaggcatgctggggacgatcgtcagctggatctagtaatcaattacggggtcattagttcatagcccatatatggagttccgcgttacataacttacggtaaatggcccgcctggctgaccgcccaacgacccccgcccattgacgtcaataatgacgtatgttcccatagtaacgccaatagggactttccattgacgtcaatgggtggagtatttacggtaaactgcccacttggcagtacatcaagtgtatcatatgccaagtacgccccctattgacgtcaatgacggtaaatggcccgcctggcattatgcccagtacatgaccttatgggactttcctacttggcagtacatctacgtattagtcatcgctattaccatgctgatgcggttttggcagtacatcaatgggcgtggatagcggtttgactcacggggatttccaagtctccaccccattgacgtcaatgggagtttgttttggcaccaaaatcaacgggactttccaaaatgtcgtaacaactccgccccattgacgcaaatgggcggtaggcgtgtacggtgggaggtctatataagcagagctggtttagtgaaccgtcagatcagatccatcgattggccaccatgagttggagctgtatcatcctcttcttggtagcaacagctacaggtaaggggttaacagtagcaggcttgaggtctggacatatatatgggtgacaatgacatccactttgcctttctctccacaggcgccatggcccaggttcagctggttcagtctggcgccgaagtgaagaaacctggcgcctctgtgaaggtgtcctgcaaggccagcggctacacctttaccagctactacatgcactgggtccgacaggcccctggacaaggacttgagtggatgggcgagatcagcccattcggcggcaggaccaactacaacgagaagttcaagagccgcgtgaccatgaccagagacaccagcacctccaccgtgtacatggaactgagcagcctgagaagcgaggacaccgccgtgtactactgtgccagagagaggccactgtacgcctctgatctttggggccagggcaccaccgtgacagtctcgagtgcctccaccaagggccctagcgtctttcctctggccccttcctccaagtctacctctggcggcaccgctgctctgggctgcctggtgaaggactacttccctgagcctgtgaccgtgtcctggaactctggcgccctgacctccggcgtgcataccttccctgccgtcctccagtcctccggcctgtactccctgtcctccgtggtgaccgtgccttcctcctctctgggcacccagacctacatctgcaacgtgaaccacaagccttccaacaccaaggtggacaagaaggtggagcctaagtcctgcgacaagacccacacctgccctccatgtcctgcccctgagctgctgggcggaccctccgtgttcctgttccctcctaagcctaaggacaccctgatgatctcccggacccctgaagtgacctgcgtggtggtggacgtgtcccacgaagatcctgaagtgaagttcaattggtacgtggacggcgtggaggtgcacaacgccaagaccaagcctcgggaggaacagtacaactccacctaccgggtggtgtctgtgctgaccgtgctgcaccaggactggctgaacggcaaagaatacaagtgcaaggtgtccaacaaggccctgcctgcccctatcgaaaagaccatctccaaggctaagggccagccacgggaacctcaggtctacacactgcctcctagccgggacgagctgaccaagaaccaggtgtccctgacctgtctggtgaagggcttctacccttccgatatcgccgtggagtgggagtctaacggccagcctgagaacaactacaagaccacccctcctgtgctggactccgacggctccttcttcctgtactccaagctgaccgtggacaagtcccggtggcagcagggcaacgtgttctcctgctccgtgatgcacgaggccctgcacaaccactacacccagaagtccctgtccctgtctcctggcaaggaacaaaaactcatctcagaagaggatctgaatgctgtgggccaggacacgcaggaggtcatcgtggtgccacactccttgccctttaaggtggtggtgatctcagccatcctggccctggtggtgctcaccatcatctcccttatcatcctcatcatgctttggcagaagaagccacgttagtaaaagcttgtcacttggaaagtaatagtttttcctgcacgggtagtaatcagcctcgactgtgccttctagttgccagccatctgttgtttgcccctcccccgtgccttccttgaccctggaaggtgccactcccactgtcctttcctaataaaatgaggaaattgcatcgcattgtctgagtaggtgtcattctattctggggggtggggtggggcaggacagcaagggggaggattgggaagacaatagcaggcatgctggggatggcccgggcatgataacttcgtataatgtatgctatacgaagttatgtatacgggtaggtaggtaattttgaagatagcaatcaagaggtgatatctgtagtatctgttcctgttgcatggctttattgtggtttgagctgtcagtaatcactagcctttgaacttctgtagaatagtaatgcctcttagcctccattgtgatgtctgtgttgtgttgtacattaagagcggtgatgaattttgaactgtaaagatgtcgttattctaaggaaacacataagaattacactaaagccttcttaattaaacgtgaaagggatgggcagaagaacttcaaattgtgtgacatgaaatcattaatttggttaaaaactaataaataaagcagcttgtctgctctaaatatttggattagattctgctgtagataaatgtaccctgtattagtcaggaaggcaccctggtgttatgacaagagcactggatcaaacatcatttgtgtatctgtggacctggctgtatgacttggggacagttatttaaactctttgaaccatctcatttttcttattcagaaaatggggacaacagcaattctatgtacttccctggacgattgggagaattaaaccaagcatatgtgaaaaggcatttggaaaagcataaggagccatatgtacgtgaagtattcttgaaactatgcttatgtataattcaactcttttgagatcaatatacaactcaaaactagaaagggggtaaaaaagaccatctgccctgagacaatttactgccacttgaggttcaacagaattcacaaatgcttaccttcagtgggttttgagtgaagacctgcaggcgatctctcgatctctcgatttcgatcaagacattcctttaatggtcttttctggacaccactaggggtcagaagtagttcatcaaactttcttccctccctaatctcattggttaccttgggctatcgaaacttaattaagccacctgacgcgccctgtagcggcgcattaagcgcggcgggtgtggtggttacgcgcagcgtgaccgctacacttgccagcgccctagcgcccgctcctttcgctttcttcccttcctttctcgccacgttcgccggctttccccgtcaagctctaaatcgggggctccctttagggttccgatttagtgctttacggcacctcgaccccaaaaaacttgattagggtgatggttcacgtagtgggccatcgccctgatagacggtttttcgccctttgacgttggagtccacgttctttaatagtggactcttgttccaaactggaacaacactcaaccctatctcggtctattcttttgatttataagggattttgccgatttcggcctattggttaaaaaatgagctgatttaacaaaaatttaacgcgaattttaacaaaatattaacgcttacaatttacgcgttaagatacattgatgagtttggacaaaccacaactagttaattaaccagtcaagtcagctacttggcgagatcgacttgtctgggtttcgactacgctcagaattgcgtcagtcaagttcgatctggtccttgctattgcacccgttctccgattacgagtttcatttaaatcatgtgagcaaaaggccagcaaaaggccaggaaccgtaaaaaggccgcgttgctggcgtttttccataggctccgcccccctgacgagcatcacaaaaatcgacgctcaagtcagaggtggcgaaacccgacaggactataaagataccaggcgtttccccctggaagctccctcgtgcgctctcctgttccgaccctgccgcttaccggatacctgtccgcctttctcccttcgggaagcgtggcgctttctcatagctcacgctgtaggtatctcagttcggtgtaggtcgttcgctccaagctgggctgtgtgcacgaaccccccgttcagcccgaccgctgcgccttatccggtaactatcgtcttgagtccaacccggtaagacacgacttatcgccactggcagcagccactggtaacaggattagcagagcgaggtatgtaggcggtgctacagagttcttgaagtggtggcctaactacggctacactagaagaacagtatttggtatctgcgctctgctgaagccagttaccttcggaaaaagagttggtagctcttgatccggcaaacaaaccaccgctggtagcggtggtttttttgtttgcaagcagcagattacgcgcagaaaaaaaggatctcaagaagatcctttgatcttttctacggggtctgacgctcagtggaacgaaaactcacgttaagggattttggtcatgagattatcaaaaaggatcttcacctagatccttttaaattaaaaatgaagttttaaatcaatctaaagtatatatgagtaaacttggtctgacagttaccaatgcttaatcagtgaggcacctatctcagcgatctgtctatttcgttcatccatagttgcatttaaatttccgaactctccaaggccctcgtcggaaaatcttcaaacctttcgtccgatccatcttgcaggctacctctcgaacgaactatcgcaagtctcttggccggccttgcgccttggctattgcttggcagcgcctatcgccaggtattactccaatcccgaatatccgagatcgggatcacccgagagaagttcaacctacatcctcaatcccgatctatccgagatccgaggaatatcgaaatcggggcgcgcctggtgtaccgagaacgatcctctcagtgcgagtctcgacgatccatatcgttgcttggcagtcagccagtcggaatccagcttgggacccaggaagtccaatcgtcagatattgtactcaagcctggtcacggcagcgtaccgatctgtttaaacctagatattgatagtctgatcggtcaacgtataatcgagtcctagcttttgcaaacatctatcaagagacaggatcagcaggaggctttcgcatgattgaacaagatggattgcacgcaggttctccggcggcttgggtggagaggctattcggctatgactgggcacaacagacaatcggctgctctgatgccgccgtgttccggctgtcagcgcaggggcgtccggttctttttgtcaagaccgacctgtccggtgccctgaatgaactgcaagacgaggcagcgcggctatcgtggctggcgacgacgggcgttccttgcgcggctgtgctcgacgttgtcactgaagcgggaagggactggctgctattgggcgaagtgccggggcaggatctcctgtcatctcaccttgctcctgccgagaaagtatccatcatggctgatgcaatgcggcggctgcatacgcttgatccggctacctgcccattcgaccaccaagcgaaacatcgcatcgagcgagcacgtactcggatggaagccggtcttgtcgatcaggatgatctggacgaagagcatcaggggctcgcgccagccgaactgttcgccaggctcaaggcgtctatgcccgacggcgaggatctcgtcgtgacccacggcgatgcctgcttgccgaatatcatggtggaaaatggccgcttttctggattcatcgactgtggccgtctgggtgtggcggaccgctatcaggacatagcgttggctacccgtgatattgctgaagagcttggcggcgaatgggctgaccgcttccttgtgctttacggtatcgccgcgcccgattcgcagcgcatcgccttctatcgccttcttgacgagttcttctgaccgattctaggtgcattggcgcagaaaaaaatgcctgatgcgacgctgcgcgtcttatactcccacatatgccagattcagcaacggatacggcttccccaacttgcccacttccatacgtgtcctccttaccagaaatttatccttaaggtcgtttaaactcgactctggctctatcgaatctccgtcgtttcgagcttacgcgaacagccgtggcgctcatttgctcgtcgggcatcgaatctcgtcagctatcgtcagcttacctttttggca

SEQ ID NO: 66 - DNA, 50 bp, synthetic construct
  source 1..50: mol_type = other DNA
ctaggctgagagagtatccctctattggaatagactgtccaggcctccta

SEQ ID NO: 67 - DNA, 10578 bp, synthetic construct
  source 1..10578: mol_type = other DNA
gcgatcgctccccgtcatccaaaagctggcattgtcagggacaagattagtcacagcagagatggcttacatcccgtgcctttccaggctggtggctgccctggctgtgccgcaggcttccagggcccagctctgacttgacgccccccccccaatcccccactccctcctctgagtctagccaggcccaggcccttcagtgtcacttcttttggggggtccaccttgttccctaccccacttcctgtgacccgtgctgtccgctgtggcctcaggagggtcctttgcccctccaaggcagtgtacccctttgttcccctggagaagaggcgctccaccgtctgttgggccccatcccataaccttcctcccctccccatgtcctattaattcaattctcggctcatccccttttggtgatcttgccacccacccccaccccccataggtttctcctcaactctctctctctctctctctctctctctctctctctctctctctctctctctctgtctctctctctctgtgtccacattgatttgcctttctggaaacttctaagcattcggtcttccaagccctatttctctctcctctggttttgtttttgttgttgttttttgttttttcccctgtgtagcccaggccaacctcaaatacaggtcctgtgtctctgaccccctcatttgtgggattacaggcatgcccactccacctaccacctcatggactatatttgggcagcatcctgctttaaaaactatgccctgtctcttagatttccaccctgtcaccttctagaacctaccccaccaggaccctgggcgactcagacactgtgattatctttttccagtgatctgtgccccgagagtgaggaccatcttgtattgccgggatccttctggattcgggatgcttttatctccccgtcatccaaaagctggcataagatgcatcttctgacctcttctcttcctcccacagggcatggcaaaacctctgagccaggaagaaagcacactgattgaaagagcaaccgctactatcaacagcatccccatctccgaagactattctgtggctagtgccgctctgtccagcgacgggagaatcttcaccggtgtgaacgtctaccactttacaggcggaccatgcgcagagctggtggtcctggggactgcagccgctgcagccgctggtaatctgacctgtatcgtggccattggcaacgaaaataggggcatcctgtccccatgcggcaggtgtcggcaggtgctgctggatctgcatcctggcatcaaggcaattgtcaaagactctgatggacagcctaccgccgtcggtatccgtgaactgctgcctagcggctatgtctgggagggataatgagcttggcttcgaaatgaccgaccaagcgacgcccaacctgccatcacgagatttcgattccaccgccgccttctatgaaaggttgggcttcggaatcgttttccgggacgccggctggatgatcctccagcgcggggatctcatgctggagttcttcgcccaccccaacttgtttattgcagcttataatggttacaaataaagcaatagcatcacaaatttcacaaataaagcatttttttcactgcattctagttgtggagatctcgtgaggctccggtgcccgtcagtgggcagagcgcacatcgcccacagtccccgagaagttggggggaggggtcggcaattgaaccggtgcctagagaaggtggcgcggggtaaactgggaaagtgatgtcgtgtactggctccgcctttttcccgagggtgggggagaaccgtatataagtgcactagtcgccgtgaacgttctttttcgcaacgggtttgccgccagaacacaggtaagtgccgtgtgtggttcccgcgggcctggcctctttacgggttatggcccttgcgtgccttgaattacttccacctggctgcagtacgtgattcttgatcccgagcttcgggttggaagtgggtgggagagttcgtggccttgcgcttaaggagccccttcgcctcgtgcttgagttgtggcctggcctgggcgctggggccgccgcgtgcgaatctggtggcaccttcgcgcctgtctcgctgctttcgataagtctctagccatttaaaatttttgatgacctgctgcgacgctttttttctggcaagatagtcttgtaaatgcgggccaagatcagcacactggtatttcggtttttggggccgcgggcggcgacggggcccgtgcgtcccagcgcacatgttcggcgaggcggggcctgcgagcgcggccaccgagaatcggacgggggtagtctcaagctgcccggcctgctctggtgcctggcctcgcgccgccgtgtatcgccccgccctgggcggcaaggctggcccggtcggcaccagttgcgtgagcggaaagatggccgcttcccggccctgctgcagggagcacaaaatggaggacgcggcgctcgggagagcgggcgggtgagtcacccacacaaaggaaaagggcctttccgtcctcagccgtcgcttcatgtgactccacggagtaccgggcgccgtccaggcacctcgattagttctccagcttttggagtacgtcgtctttaggttggggggaggggttttatgcgatggagtttccccacactgagtgggtggagactgaagttaggccagcttggcacttgatgtaattctccttggaatttgccctttttgagtttggatcttggttcattctcaagcctcagacagtggttcaaagtttttttcttccatttcaggtgtcgtgaaaactacccctaaaagccaaaagatccggagtggccaccatgagggcctggatcttctttctcctttgcctggccgggagggctctggcagctagcgacatccagatgacacagagccctagcagcctgtctgccagcgtgggagacagagtgaccatcacctgtagagccagccagggcatctcttctgccctggcatggtatcagcagaagcctggcaaggcccctaagctgctgatctacagcgccagccacagatacaccggcgtgcccagcagattttctggcagcggctctggcaccgacttcaccttcaccataagcagcctgcagcctgaggatatcgccacctactactgccagcagcggtactctgacacccggacatttggccagggcaccaagctggaaatcaagcgtaccgcggccgcaccttccgtgttcatcttccctccctccgacgagcagctgaagtccggcaccgcctctgtggtgtgcctgctgaacaacttctaccctcgggaggccaaggtgcagtggaaggtggacaacgccctgcagtccggcaactcccaggaatccgtcaccgagcaggactccaaggactctacctactccctgtcctccaccctgaccctgtccaaggccgactacgagaagcacaagctgtacgcctgcgaagtgacccaccagggcctgtcctctcccgtgaccaagtccttcaaccggggcgagtgctaataaggatccacgacgtgatcagcctcgactgtgccttctagttgccagccatctgttgtttgcccctcccccgtgccttccttgaccctggaaggtgccactcccactgtcctttcctaataaaatgaggaaattgcatcgcattgtctgagtaggtgtcattctattctggggggtggggtggggcaggacagcaagggggaggattgggaagacaatagcaggcatgctggggacgatcgtcagctggatctagtaatcaattacggggtcattagttcatagcccatatatggagttccgcgttacataacttacggtaaatggcccgcctggctgaccgcccaacgacccccgcccattgacgtcaataatgacgtatgttcccatagtaacgccaatagggactttccattgacgtcaatgggtggagtatttacggtaaactgcccacttggcagtacatcaagtgtatcatatgccaagtacgccccctattgacgtcaatgacggtaaatggcccgcctggcattatgcccagtacatgaccttatgggactttcctacttggcagtacatctacgtattagtcatcgctattaccatgctgatgcggttttggcagtacatcaatgggcgtggatagcggtttgactcacggggatttccaagtctccaccccattgacgtcaatgggagtttgttttggcaccaaaatcaacgggactttccaaaatgtcgtaacaactccgccccattgacgcaaatgggcggtaggcgtgtacggtgggaggtctatataagcagagctggtttagtgaaccgtcagatcagatccatcgattggccaccatgagttggagctgtatcatcctcttcttggtagcaacagctacaggtaaggggttaacagtagcaggcttgaggtctggacatatatatgggtgacaatgacatccactttgcctttctctccacaggcgccatggcccaggttcagctggttcagtctggcgccgaagtgaagaaacctggcgcctctgtgaaggtgtcctgcaaggccagcggctacacctttaccagctactacatgcactgggtccgacaggcccctggacaaggacttgagtggatgggcgagatcaacccatctggcggcagcaccaactacaacgagaagttcaagagccgcgtgaccatgaccagagacaccagcacctccaccgtgtacatggaactgagcagcctgagaagcgaggacaccgccgtgtactactgtgccagagagaggccactgtacgcctctgatctttggggccagggcaccaccgtgacagtctcgagtgcctccaccaagggccctagcgtctttcctctggccccttcctccaagtctacctctggcggcaccgctgctctgggctgcctggtgaaggactacttccctgagcctgtgaccgtgtcctggaactctggcgccctgacctccggcgtgcataccttccctgccgtcctccagtcctccggcctgtactccctgtcctccgtggtgaccgtgccttcctcctctctgggcacccagacctacatctgcaacgtgaaccacaagccttccaacaccaaggtggacaagaaggtggagcctaagtcctgcgacaagacccacacctgccctccatgtcctgcccctgagctgctgggcggaccctccgtgttcctgttccctcctaagcctaaggacaccctgatgatctcccggacccctgaagtgacctgcgtggtggtggacgtgtcccacgaagatcctgaagtgaagttcaattggtacgtggacggcgtggaggtgcacaacgccaagaccaagcctcgggaggaacagtacaactccacctaccgggtggtgtctgtgctgaccgtgctgcaccaggactggctgaacggcaaagaatacaagtgcaaggtgtccaacaaggccctgcctgcccctatcgaaaagaccatctccaaggctaagggccagccacgggaacctcaggtctacacactgcctcctagccgggacgagctgaccaagaaccaggtgtccctgacctgtctggtgaagggcttctacccttccgatatcgccgtggagtgggagtctaacggccagcctgagaacaactacaagaccacccctcctgtgctggactccgacggctccttcttcctgtactccaagctgaccgtggacaagtcccggtggcagcagggcaacgtgttctcctgctccgtgatgcacgaggccctgcacaaccactacacccagaagtccctgtccctgtctcctggcaaggaacaaaaactcatctcagaagaggatctgaatgctgtgggccaggacacgcaggaggtcatcgtggtgccacactccttgccctttaaggtggtggtgatctcagccatcctggccctggtggtgctcaccatcatctcccttatcatcctcatcatgctttggcagaagaagccacgttagtaaaagcttgtcacttggaaagtaatagtttttcctgcacgggtagtaatcagcctcgactgtgccttctagttgccagccatctgttgtttgcccctcccccgtgccttccttgaccctggaaggtgccactcccactgtcctttcctaataaaatgaggaaattgcatcgcattgtctgagtaggtgtcattctattctggggggtggggtggggcaggacagcaagggggaggattgggaagacaatagcaggcatgctggggatggcccgggcatgataacttcgtataatgtatgctatacgaagttatgtatacggcgcgcccactagggacaggattggtgacagaaaagccccatccttaggcctcctccttcctagtctcctgatattgggtctaacccccacctcctgttaggcagattccttatctggtgacacacccccatttcctggagccatctctctccttgccagaacctctaaggtttgcttacgatggagccagagaggatcctgggagggagagcttggcagggggtgggagggaagggggggatgcgtgacctgcccggttctcagtggccaccctgcgctaccctctcccagaacctgagctgctctgacgcggctgtctggtgcgtttcactgatcctggtgctgcagcttccttacacttcccaagaggagaagcagtttggaaaaacaaaatcagaataagttggtcctgagttctaactttggctcttcacctttctagtccccaatttatattgttcctccgtgcgtcagttttacctgtgagataaggccagtagccagccccgtcctggcagggctgtggtgaggaggggggtgtccgtgtggaaaactccctttgtgagaatggtgcgtcctaggtgttcaccaggtcgtggccgcctctactccctttctctttctccatccttctttccttaaagagtccccagtgctatctgggacatattcctccgcccagagcagggtcccgcttccctaaggccctgctctgggcttctgggtttgagtccttggcaagcccaggagaggcgctcaggcttccctgtcccccttcctcgtccaccatctcatgcccctggctctcctgccccttccctacaggggttcctggctctgctctcctgcaggtccccgtcatccaaaagctggcattgtagggacaagattagtcacagcagacgatctctcgatctctcgatttcgatcaagacattcctttaatggtcttttctggacaccactaggggtcagaagtagttcatcaaactttcttccctccctaatctcattggttaccttgggctatcgaaacttaattaagccacctgacgcgccctgtagcggcgcattaagcgcggcgggtgtggtggttacgcgcagcgtgaccgctacacttgccagcgccctagcgcccgctcctttcgctttcttcccttcctttctcgccacgttcgccggctttccccgtcaagctctaaatcgggggctccctttagggttccgatttagtgctttacggcacctcgaccccaaaaaacttgattagggtgatggttcacgtagtgggccatcgccctgatagacggtttttcgccctttgacgttggagtccacgttctttaatagtggactcttgttccaaactggaacaacactcaaccctatctcggtctattcttttgatttataagggattttgccgatttcggcctattggttaaaaaatgagctgatttaacaaaaatttaacgcgaattttaacaaaatattaacgcttacaatttacgcgttaagatacattgatgagtttggacaaaccacaactagttaattaaccagtcaagtcagctacttggcgagatcgacttgtctgggtttcgactacgctcagaattgcgtcagtcaagttcgatctggtccttgctattgcacccgttctccgattacgagtttcatttaaatcatgtgagcaaaaggccagcaaaaggccaggaaccgtaaaaaggccgcgttgctggcgtttttccataggctccgcccccctgacgagcatcacaaaaatcgacgctcaagtcagaggtggcgaaacccgacaggactataaagataccaggcgtttccccctggaagctccctcgtgcgctctcctgttccgaccctgccgcttaccggatacctgtccgcctttctcccttcgggaagcgtggcgctttctcatagctcacgctgtaggtatctcagttcggtgtaggtcgttcgctccaagctgggctgtgtgcacgaaccccccgttcagcccgaccgctgcgccttatccggtaactatcgtcttgagtccaacccggtaagacacgacttatcgccactggcagcagccactggtaacaggattagcagagcgaggtatgtaggcggtgctacagagttcttgaagtggtggcctaactacggctacactagaagaacagtatttggtatctgcgctctgctgaagccagttaccttcggaaaaagagttggtagctcttgatccggcaaacaaaccaccgctggtagcggtggtttttttgtttgcaagcagcagattacgcgcagaaaaaaaggatctcaagaagatcctttgatcttttctacggggtctgacgctcagtggaacgaaaactcacgttaagggattttggtcatgagattatcaaaaaggatcttcacctagatccttttaaattaaaaatgaagttttaaatcaatctaaagtatatatgagtaaacttggtctgacagttaccaatgcttaatcagtgaggcacctatctcagcgatctgtctatttcgttcatccatagttgcatttaaatttccgaactctccaaggccctcgtcggaaaatcttcaaacctttcgtccgatccatcttgcaggctacctctcgaacgaactatcgcaagtctcttggccggccttgcgccttggctattgcttggcagcgcctatcgccaggtattactccaatcccgaatatccgagatcgggatcacccgagagaagttcaacctacatcctcaatcccgatctatccgagatccgaggaatatcgaaatcggggcgcgcctggtgtaccgagaacgatcctctcagtgcgagtctcgacgatccatatcgttgcttggcagtcagccagtcggaatccagcttgggacccaggaagtccaatcgtcagatattgtactcaagcctggtcacggcagcgtaccgatctgtttaaacctagatattgatagtctgatcggtcaacgtataatcgagtcctagcttttgcaaacatctatcaagagacaggatcagcaggaggctttcgcatgattgaacaagatggattgcacgcaggttctccggcggcttgggtggagaggctattcggctatgactgggcacaacagacaatcggctgctctgatgccgccgtgttccggctgtcagcgcaggggcgtccggttctttttgtcaagaccgacctgtccggtgccctgaatgaactgcaagacgaggcagcgcggctatcgtggctggcgacgacgggcgttccttgcgcggctgtgctcgacgttgtcactgaagcgggaagggactggctgctattgggcgaagtgccggggcaggatctcctgtcatctcaccttgctcctgccgagaaagtatccatcatggctgatgcaatgcggcggctgcatacgcttgatccggctacctgcccattcgaccaccaagcgaaacatcgcatcgagcgagcacgtactcggatggaagccggtcttgtcgatcaggatgatctggacgaagagcatcaggggctcgcgccagccgaactgttcgccaggctcaaggcgtctatgcccgacggcgaggatctcgtcgtgacccacggcgatgcctgcttgccgaatatcatggtggaaaatggccgcttttctggattcatcgactgtggccgtctgggtgtggcggaccgctatcaggacatagcgttggctacccgtgatattgctgaagagcttggcggcgaatgggctgaccgcttccttgtgctttacggtatcgccgcgcccgattcgcagcgcatcgccttctatcgccttcttgacgagttcttctgaccgattctaggtgcattggcgcagaaaaaaatgcctgatgcgacgctgcgcgtcttatactcccacatatgccagattcagcaacggatacggcttccccaacttgcccacttccatacgtgtcctccttaccagaaatttatccttaaggtcgtttaaactcgactctggctctatcgaatctccgtcgtttcgagcttacgcgaacagccgtggcgctcatttgctcgtcgggcatcgaatctcgtcagctatcgtcagcttacctttttggca

SEQ ID NO: 68 - DNA, 10627 bp, synthetic construct
  source 1..10627: mol_type = other DNA
gcttttctggattcatcgactgtggccgtctgggtgtggcggaccgctatcaggacatagcgttggctacccgtgatattgctgaagagcttggcggcgaatgggctgaccgcttccttgtgctttacggtatcgccgcgcccgattcgcagcgcatcgccttctatcgccttcttgacgagttcttctgaccgattctaggtgcattggcgcagaaaaaaatgcctgatgcgacgctgcgcgtcttatactcccacatatgccagattcagcaacggatacggcttccccaacttgcccacttccatacgtgtcctccttaccagaaatttatccttaaggtcgtttaaactcgactctggctctatcgaatctccgtcgtttcgagcttacgcgaacagccgtggcgctcatttgctcgtcgggcatcgaatctcgtcagctatcgtcagcttacctttttggcaggcaggagagccaggttctccggacatttatgatccaagaggtacttgaggcgatcgccacctcttggggtaaattccctgaccactactaaattcagcctctctgaatcctggaaggacttccatagcccaagcattacttactctagtagctgatagtttctgagatcaggaacccagttttttgttgttcacttttatatgtctaacatttaacatggtgttattacttagcagatgctgaataaatgtttctgttaaatggataaatgaaaagatagcatcagcattagtaactgaagattcagtattccctgttaatgtctaaagagtacagacttagatttgatgaatgttattgacaatgtagataaaagtaagtatgactgagtaggaagtagatgttttaaactgtttgaaatgactggttttaaatttgttaaagtaaaatgctagttgctaagggaaattactatgtctaagtgttaattagtcaatagaaacctagttgcacacttctaaacatagagtggagtggtatgcagtggtcagttagttgcctgatgctatgctcaagcagcagatacaggaggatcttgagtatatactagggtgggcacaaggcagagatgaagccataaatgagaagtcatatccataaatgacaaaggaacttcgtcatattctaaagtcatcattggaggcattcaaggtcacttgtttccttacagacccagctgatagctctataaagcagtagtctaattaatgattctccagaaaccaagttcttctaaatatgttggcctgaatatgagagaagtgacagtctgcaaaatactgggtcagaagcaatcaagctgagaaggagcagaaggcgagtctctcttggataggcctgaggtcagctcatggcaggagagccaggttctccggacatttatgatccaagatgcatcttctgacctcttctcttcctcccacaggggcatggcaaaacctctgagccaggaagaaagcacactgattgaaagagcaaccgctactatcaacagcatccccatctccgaagactattctgtggctagtgccgctctgtccagcgacgggagaatcttcaccggtgtgaacgtctaccactttacaggcggaccatgcgcagagctggtggtcctggggactgcagccgctgcagccgctggtaatctgacctgtatcgtggccattggcaacgaaaataggggcatcctgtccccatgcggcaggtgtcggcaggtgctgctggatctgcatcctggcatcaaggcaattgtcaaagactctgatggacagcctaccgccgtcggtatccgtgaactgctgcctagcggctatgtctgggagggataatgagcttggcttcgaaatgaccgaccaagcgacgcccaacctgccatcacgagatttcgattccaccgccgccttctatgaaaggttgggcttcggaatcgttttccgggacgccggctggatgatcctccagcgcggggatctcatgctggagttcttcgcccaccccaacttgtttattgcagcttataatggttacaaataaagcaatagcatcacaaatttcacaaataaagcatttttttcactgcattctagttgtggagatctcgtgaggctccggtgcccgtcagtgggcagagcgcacatcgcccacagtccccgagaagttggggggaggggtcggcaattgaaccggtgcctagagaaggtggcgcggggtaaactgggaaagtgatgtcgtgtactggctccgcctttttcccgagggtgggggagaaccgtatataagtgcactagtcgccgtgaacgttctttttcgcaacgggtttgccgccagaacacaggtaagtgccgtgtgtggttcccgcgggcctggcctctttacgggttatggcccttgcgtgccttgaattacttccacctggctgcagtacgtgattcttgatcccgagcttcgggttggaagtgggtgggagagttcgtggccttgcgcttaaggagccccttcgcctcgtgcttgagttgtggcctggcctgggcgctggggccgccgcgtgcgaatctggtggcaccttcgcgcctgtctcgctgctttcgataagtctctagccatttaaaatttttgatgacctgctgcgacgctttttttctggcaagatagtcttgtaaatgcgggccaagatcagcacactggtatttcggtttttggggccgcgggcggcgacggggcccgtgcgtcccagcgcacatgttcggcgaggcggggcctgcgagcgcggccaccgagaatcggacgggggtagtctcaagctgcccggcctgctctggtgcctggcctcgcgccgccgtgtatcgccccgccctgggcggcaaggctggcccggtcggcaccagttgcgtgagcggaaagatggccgcttcccggccctgctgcagggagcacaaaatggaggacgcggcgctcgggagagcgggcgggtgagtcacccacacaaaggaaaagggcctttccgtcctcagccgtcgcttcatgtgactccacggagtaccgggcgccgtccaggcacctcgattagttctccagcttttggagtacgtcgtctttaggttggggggaggggttttatgcgatggagtttccccacactgagtgggtggagactgaagttaggccagcttggcacttgatgtaattctccttggaatttgccctttttgagtttggatcttggttcattctcaagcctcagacagtggttcaaagtttttttcttccatttcaggtgtcgtgaaaactacccctaaaagccaaaagatccggagtggccaccatgagggcctggatcttctttctcctttgcctggccgggagggctctggcagctagcgacatccagatgacacagagccctagcagcctgtctgccagcgtgggagacagagtgaccatcacctgtagagccagccagggcatctcttctgccctggcatggtatcagcagaagcctggcaaggcccctaagctgctgatctacagcgccagctacagatacaccggcgtgcccagcagattttctggcagcggctctggcaccgacttcaccttcaccataagcagcctgcagcctgaggatatcgccacctactactgccagcagcggtactctctgtggcggacatttggccagggcaccaagctggaaatcaagcgtaccgcggccgcaccttccgtgttcatcttccctccctccgacgagcagctgaagtccggcaccgcctctgtggtgtgcctgctgaacaacttctaccctcgggaggccaaggtgcagtggaaggtggacaacgccctgcagtccggcaactcccaggaatccgtcaccgagcaggactccaaggactctacctactccctgtcctccaccctgaccctgtccaaggccgactacgagaagcacaagctgtacgcctgcgaagtgacccaccagggcctgtcctctcccgtgaccaagtccttcaaccggggcgagtgctaataaggatccacgacgtgatcagcctcgactgtgccttctagttgccagccatctgttgtttgcccctcccccgtgccttccttgaccctggaaggtgccactcccactgtcctttcctaataaaatgaggaaattgcatcgcattgtctgagtaggtgtcattctattctggggggtggggtggggcaggacagcaagggggaggattgggaagacaatagcaggcatgctggggacgatcgtcagctggatctagtaatcaattacggggtcattagttcatagcccatatatggagttccgcgttacataacttacggtaaatggcccgcctggctgaccgcccaacgacccccgcccattgacgtcaataatgacgtatgttcccatagtaacgccaatagggactttccattgacgtcaatgggtggagtatttacggtaaactgcccacttggcagtacatcaagtgtatcatatgccaagtacgccccctattgacgtcaatgacggtaaatggcccgcctggcattatgcccagtacatgaccttatgggactttcctacttggcagtacatctacgtattagtcatcgctattaccatgctgatgcggttttggcagtacatcaatgggcgtggatagcggtttgactcacggggatttccaagtctccaccccattgacgtcaatgggagtttgttttggcaccaaaatcaacgggactttccaaaatgtcgtaacaactccgccccattgacgcaaatgggcggtaggcgtgtacggtgggaggtctatataagcagagctggtttagtgaaccgtcagatcagatccatcgattggccaccatgagttggagctgtatcatcctcttcttggtagcaacagctacaggtaaggggttaacagtagcaggcttgaggtctggacatatatatgggtgacaatgacatccactttgcctttctctccacaggcgccatggcccaggttcagctggttcagtctggcgccgaagtgaagaaacctggcgcctctgtgaaggtgtcctgcaaggccagcggctacacctttaccagctactacatgcactgggtccgacaggcccctggacaaggacttgagtggatgggcgagatcagcccattcggcggcaggaccaactacaacgagaagttcaagagccgcgtgaccatgaccagagacaccagcacctccaccgtgtacatggaactgagcagcctgagaagcgaggacaccgccgtgtactactgtgccagagagaggccactgtacgcctctgatctttggggccagggcaccaccgtgacagtctcgagtgcctccaccaagggccctagcgtctttcctctggccccttcctccaagtctacctctggcggcaccgctgctctgggctgcctggtgaaggactacttccctgagcctgtgaccgtgtcctggaactctggcgccctgacctccggcgtgcataccttccctgccgtcctccagtcctccggcctgtactccctgtcctccgtggtgaccgtgccttcctcctctctgggcacccagacctacatctgcaacgtgaaccacaagccttccaacaccaaggtggacaagaaggtggagcctaagtcctgcgacaagacccacacctgccctccatgtcctgcccctgagctgctgggcggaccctccgtgttcctgttccctcctaagcctaaggacaccctgatgatctcccggacccctgaagtgacctgcgtggtggtggacgtgtcccacgaagatcctgaagtgaagttcaattggtacgtggacggcgtggaggtgcacaacgccaagaccaagcctcgggaggaacagtacaactccacctaccgggtggtgtctgtgctgaccgtgctgcaccaggactggctgaacggcaaagaatacaagtgcaaggtgtccaacaaggccctgcctgcccctatcgaaaagaccatctccaaggctaagggccagccacgggaacctcaggtctacacactgcctcctagccgggacgagctgaccaagaaccaggtgtccctgacctgtctggtgaagggcttctacccttccgatatcgccgtggagtgggagtctaacggccagcctgagaacaactacaagaccacccctcctgtgctggactccgacggctccttcttcctgtactccaagctgaccgtggacaagtcccggtggcagcagggcaacgtgttctcctgctccgtgatgcacgaggccctgcacaaccactacacccagaagtccctgtccctgtctcctggcaaggaacaaaaactcatctcagaagaggatctgaatgctgtgggccaggacacgcaggaggtcatcgtggtgccacactccttgccctttaaggtggtggtgatctcagccatcctggccctggtggtgctcaccatcatctcccttatcatcctcatcatgctttggcagaagaagccacgttagtaaaagcttgtcacttggaaagtaatagtttttcctgcacgggtagtaatcagcctcgactgtgccttctagttgccagccatctgttgtttgcccctcccccgtgccttccttgaccctggaaggtgccactcccactgtcctttcctaataaaatgaggaaattgcatcgcattgtctgagtaggtgtcattctattctggggggtggggtggggcaggacagcaagggggaggattgggaagacaatagcaggcatgctggggatggcccgggcatgataacttcgtataatgtatgctatacgaagttatgtatacggcgcgccaagaggtacttgagattgaggacatacatgtccctaaacagggcatgttcctgaaagagacaaacattctattggtcggattaagaaatagtggcatgctgtttcatgtaggcagattttttttgtagggacagtgatcagctctgttctgccagccacttcccaaataaccattcagaaatattattcattgaaaatgcttgaccaataactaaggcatattactaactagttcttacaactgaaattaaccaatttctattaatctgtgtgctaccacaaggctcatgtcttttacctttcctgctttctttacatctggctgaccactcctctgactccaccctcctccttccctatgttcttgctgccccgaaaatcctgcccagccatcggccaatcagctttttagtaacaatgagagcactacatatttacagtgtacaaaaattgttccacagcagttttacctatgtggtggaaaaagtactcagcccaagcacaccatgataatgagatcatatttggaacacatatcatacctgctgtattaaatccagctcctttgctaaaagtactactctcataacataatatagttaactaaaaagaaatgaaaatctgagttggaatagcaaaagaacccagccttggtcaaaaaggtgtgtaactgctcatcagaaatgcttcatgtcaacactgaagtgcttgctgtcaagtttcagaggtggtgggtgatggaagatggctggttgcaacctgtgcataaactccagaactttattcttttgttctgtaaaccttaacttggtgcagttaactgtgccagggccagtgcacatgggacctgtttggaaaaacttagattggtattatttacttactaaagttcctgcaggggcaggagagccaggttctccggacatttatgatccaagaggtacttgagcgatctctcgatctctcgatttcgatcaagacattcctttaatggtcttttctggacaccactaggggtcagaagtagttcatcaaactttcttccctccctaatctcattggttaccttgggctatcgaaacttaattaagccacctgacgcgccctgtagcggcgcattaagcgcggcgggtgtggtggttacgcgcagcgtgaccgctacacttgccagcgccctagcgcccgctcctttcgctttcttcccttcctttctcgccacgttcgccggctttccccgtcaagctctaaatcgggggctccctttagggttccgatttagtgctttacggcacctcgaccccaaaaaacttgattagggtgatggttcacgtagtgggccatcgccctgatagacggtttttcgccctttgacgttggagtccacgttctttaatagtggactcttgttccaaactggaacaacactcaaccctatctcggtctattcttttgatttataagggattttgccgatttcggcctattggttaaaaaatgagctgatttaacaaaaatttaacgcgaattttaacaaaatattaacgcttacaatttacgcgttaagatacattgatgagtttggacaaaccacaactagttaattaaccagtcaagtcagctacttggcgagatcgacttgtctgggtttcgactacgctcagaattgcgtcagtcaagttcgatctggtccttgctattgcacccgttctccgattacgagtttcatttaaatcatgtgagcaaaaggccagcaaaaggccaggaaccgtaaaaaggccgcgttgctggcgtttttccataggctccgcccccctgacgagcatcacaaaaatcgacgctcaagtcagaggtggcgaaacccgacaggactataaagataccaggcgtttccccctggaagctccctcgtgcgctctcctgttccgaccctgccgcttaccggatacctgtccgcctttctcccttcgggaagcgtggcgctttctcatagctcacgctgtaggtatctcagttcggtgtaggtcgttcgctccaagctgggctgtgtgcacgaaccccccgttcagcccgaccgctgcgccttatccggtaactatcgtcttgagtccaacccggtaagacacgacttatcgccactggcagcagccactggtaacaggattagcagagcgaggtatgtaggcggtgctacagagttcttgaagtggtggcctaactacggctacactagaagaacagtatttggtatctgcgctctgctgaagccagttaccttcggaaaaagagttggtagctcttgatccggcaaacaaaccaccgctggtagcggtggtttttttgtttgcaagcagcagattacgcgcagaaaaaaaggatctcaagaagatcctttgatcttttctacggggtctgacgctcagtggaacgaaaactcacgttaagggattttggtcatgagattatcaaaaaggatcttcacctagatccttttaaattaaaaatgaagttttaaatcaatctaaagtatatatgagtaaacttggtctgacagttaccaatgcttaatcagtgaggcacctatctcagcgatctgtctatttcgttcatccatagttgcatttaaatttccgaactctccaaggccctcgtcggaaaatcttcaaacctttcgtccgatccatcttgcaggctacctctcgaacgaactatcgcaagtctcttggccggccttgcgccttggctattgcttggcagcgcctatcgccaggtattactccaatcccgaatatccgagatcgggatcacccgagagaagttcaacctacatcctcaatcccgatctatccgagatccgaggaatatcgaaatcggggcgcgcctggtgtaccgagaacgatcctctcagtgcgagtctcgacgatccatatcgttgcttggcagtcagccagtcggaatccagcttgggacccaggaagtccaatcgtcagatattgtactcaagcctggtcacggcagcgtaccgatctgtttaaacctagatattgatagtctgatcggtcaacgtataatcgagtcctagcttttgcaaacatctatcaagagacaggatcagcaggaggctttcgcatgattgaacaagatggattgcacgcaggttctccggcggcttgggtggagaggctattcggctatgactgggcacaacagacaatcggctgctctgatgccgccgtgttccggctgtcagcgcaggggcgtccggttctttttgtcaagaccgacctgtccggtgccctgaatgaactgcaagacgaggcagcgcggctatcgtggctggcgacgacgggcgttccttgcgcggctgtgctcgacgttgtcactgaagcgggaagggactggctgctattgggcgaagtgccggggcaggatctcctgtcatctcaccttgctcctgccgagaaagtatccatcatggctgatgcaatgcggcggctgcatacgcttgatccggctacctgcccattcgaccaccaagcgaaacatcgcatcgagcgagcacgtactcggatggaagccggtcttgtcgatcaggatgatctggacgaagagcatcaggggctcgcgccagccgaactgttcgccaggctcaaggcgtctatgcccgacggcgaggatctcgtcgtgacccacggcgatgcctgcttgccgaatatcatggtggaaaatggcc

SEQ ID NO: 69 - DNA, 10627 bp, synthetic construct
  source 1..10627: mol_type = other DNA
gcttttctggattcatcgactgtggccgtctgggtgtggcggaccgctatcaggacatagcgttggctacccgtgatattgctgaagagcttggcggcgaatgggctgaccgcttccttgtgctttacggtatcgccgcgcccgattcgcagcgcatcgccttctatcgccttcttgacgagttcttctgaccgattctaggtgcattggcgcagaaaaaaatgcctgatgcgacgctgcgcgtcttatactcccacatatgccagattcagcaacggatacggcttccccaacttgcccacttccatacgtgtcctccttaccagaaatttatccttaaggtcgtttaaactcgactctggctctatcgaatctccgtcgtttcgagcttacgcgaacagccgtggcgctcatttgctcgtcgggcatcgaatctcgtcagctatcgtcagcttacctttttggcaggcaggagagccaggttctccggacatttatgatccaagaggtacttgaggcgatcgccacctcttggggtaaattccctgaccactactaaattcagcctctctgaatcctggaaggacttccatagcccaagcattacttactctagtagctgatagtttctgagatcaggaacccagttttttgttgttcacttttatatgtctaacatttaacatggtgttattacttagcagatgctgaataaatgtttctgttaaatggataaatgaaaagatagcatcagcattagtaactgaagattcagtattccctgttaatgtctaaagagtacagacttagatttgatgaatgttattgacaatgtagataaaagtaagtatgactgagtaggaagtagatgttttaaactgtttgaaatgactggttttaaatttgttaaagtaaaatgctagttgctaagggaaattactatgtctaagtgttaattagtcaatagaaacctagttgcacacttctaaacatagagtggagtggtatgcagtggtcagttagttgcctgatgctatgctcaagcagcagatacaggaggatcttgagtatatactagggtgggcacaaggcagagatgaagccataaatgagaagtcatatccataaatgacaaaggaacttcgtcatattctaaagtcatcattggaggcattcaaggtcacttgtttccttacagacccagctgatagctctataaagcagtagtctaattaatgattctccagaaaccaagttcttctaaatatgttggcctgaatatgagagaagtgacagtctgcaaaatactgggtcagaagcaatcaagctgagaaggagcagaaggcgagtctctcttggataggcctgaggtcagctcatggcaggagagccaggttctccggacatttatgatccaagatgcatcttctgacctcttctcttcctcccacaggggcatggcaaaacctctgagccaggaagaaagcacactgattgaaagagcaaccgctactatcaacagcatccccatctccgaagactattctgtggctagtgccgctctgtccagcgacgggagaatcttcaccggtgtgaacgtctaccactttacaggcggaccatgcgcagagctggtggtcctggggactgcagccgctgcagccgctggtaatctgacctgtatcgtggccattggcaacgaaaataggggcatcctgtccccatgcggcaggtgtcggcaggtgctgctggatctgcatcctggcatcaaggcaattgtcaaagactctgatggacagcctaccgccgtcggtatccgtgaactgctgcctagcggctatgtctgggagggataatgagcttggcttcgaaatgaccgaccaagcgacgcccaacctgccatcacgagatttcgattccaccgccgccttctatgaaaggttgggcttcggaatcgttttccgggacgccggctggatgatcctccagcgcggggatctcatgctggagttcttcgcccaccccaacttgtttattgcagcttataatggttacaaataaagcaatagcatcacaaatttcacaaataaagcatttttttcactgcattctagttgtggagatctcgtgaggctccggtgcccgtcagtgggcagagcgcacatcgcccacagtccccgagaagttggggggaggggtcggcaattgaaccggtgcctagagaaggtggcgcggggtaaactgggaaagtgatgtcgtgtactggctccgcctttttcccgagggtgggggagaaccgtatataagtgcactagtcgccgtgaacgttctttttcgcaacgggtttgccgccagaacacaggtaagtgccgtgtgtggttcccgcgggcctggcctctttacgggttatggcccttgcgtgccttgaattacttccacctggctgcagtacgtgattcttgatcccgagcttcgggttggaagtgggtgggagagttcgtggccttgcgcttaaggagccccttcgcctcgtgcttgagttgtggcctggcctgggcgctggggccgccgcgtgcgaatctggtggcaccttcgcgcctgtctcgctgctttcgataagtctctagccatttaaaatttttgatgacctgctgcgacgctttttttctggcaagatagtcttgtaaatgcgggccaagatcagcacactggtatttcggtttttggggccgcgggcggcgacggggcccgtgcgtcccagcgcacatgttcggcgaggcggggcctgcgagcgcggccaccgagaatcggacgggggtagtctcaagctgcccggcctgctctggtgcctggcctcgcgccgccgtgtatcgccccgccctgggcggcaaggctggcccggtcggcaccagttgcgtgagcggaaagatggccgcttcccggccctgctgcagggagcacaaaatggaggacgcggcgctcgggagagcgggcgggtgagtcacccacacaaaggaaaagggcctttccgtcctcagccgtcgcttcatgtgactccacggagtaccgggcgccgtccaggcacctcgattagttctccagcttttggagtacgtcgtctttaggttggggggaggggttttatgcgatggagtttccccacactgagtgggtggagactgaagttaggccagcttggcacttgatgtaattctccttggaatttgccctttttgagtttggatcttggttcattctcaagcctcagacagtggttcaaagtttttttcttccatttcaggtgtcgtgaaaactacccctaaaagccaaaagatccggagtggccaccatgagggcctggatcttctttctcctttgcctggccgggagggctctggcagctagcgacatccagatgacacagagccctagcagcctgtctgccagcgtgggagacagagtgaccatcacatgcaaggccagccaggatgtgtctacagccgtggcctggtatcagcagaagcctggaaaggcccctaagctgctgatctacagcgccagctacagatacaccggcgtgcccagcagattttctggcagcggctctggcaccgacttcaccttcaccataagcagcctgcagcctgaggatatcgccacctactactgccagcagcggtacagcacccctagaacatttggccagggcaccaagctggaaatcaagcgtaccgcggccgccccttccgtgttcatcttccctccctccgacgagcagctgaagtccggcaccgcctctgtggtgtgcctgctgaacaacttctaccctcgggaggccaaggtgcagtggaaggtggacaacgccctgcagtccggcaactcccaggaatccgtcaccgagcaggactccaaggactctacctactccctgtcctccaccctgaccctgtccaaggccgactacgagaagcacaagctgtacgcctgcgaagtgacccaccagggcctgtcctctcccgtgaccaagtccttcaaccggggcgagtgctaataaaagcttacgacgtgatcagcctcgactgtgccttctagttgccagccatctgttgtttgcccctcccccgtgccttccttgaccctggaaggtgccactcccactgtcctttcctaataaaatgaggaaattgcatcgcattgtctgagtaggtgtcattctattctggggggtggggtggggcaggacagcaagggggaggattgggaagacaatagcaggcatgctggggacgatcgtcagctggatctagtaatcaattacggggtcattagttcatagcccatatatggagttccgcgttacataacttacggtaaatggcccgcctggctgaccgcccaacgacccccgcccattgacgtcaataatgacgtatgttcccatagtaacgccaatagggactttccattgacgtcaatgggtggagtatttacggtaaactgcccacttggcagtacatcaagtgtatcatatgccaagtacgccccctattgacgtcaatgacggtaaatggcccgcctggcattatgcccagtacatgaccttatgggactttcctacttggcagtacatctacgtattagtcatcgctattaccatgctgatgcggttttggcagtacatcaatgggcgtggatagcggtttgactcacggggatttccaagtctccaccccattgacgtcaatgggagtttgttttggcaccaaaatcaacgggactttccaaaatgtcgtaacaactccgccccattgacgcaaatgggcggtaggcgtgtacggtgggaggtctatataagcagagctggtttagtgaaccgtcagatcagatccatcgattggccaccatgagttggagctgtatcatcctcttcttggtagcaacagctacaggtaaggggttaacagtagcaggcttgaggtctggacatatatatgggtgacaatgacatccactttgcctttctctccacaggcgccatggcccaggttcagctggttcagtctggcgccgaagtgaagaaacctggcgcctctgtgaaggtgtcctgcaaggccagcggctacacctttaccagctactacatgcactgggtccgacaggcccctggacaaggacttgagtggatgggcgagatcaaccctagcggcggcaggaccaactacaacgagaagttcaagagccgcgtgaccatgaccagagacaccagcacctccaccgtgtacatggaactgagcagcctgagaagcgaggacaccgccgtgtactactgtgccagagaaagacccctgtacgctatggactattggggccagggcaccaccgtgacagtctcgagtgcctccaccaagggccctagcgtctttcctctggccccttcctccaagtctacctctggcggcaccgctgctctgggctgcctggtgaaggactacttccctgagcctgtgaccgtgtcctggaactctggcgccctgacctccggcgtgcataccttccctgccgtcctccagtcctccggcctgtactccctgtcctccgtggtgaccgtgccttcctcctctctgggcacccagacctacatctgcaacgtgaaccacaagccttccaacaccaaggtggacaagaaggtggagcctaagtcctgcgacaagacccacacctgccctccatgtcctgcccctgagctgctgggcggaccctccgtgttcctgttccctcctaagcctaaggacaccctgatgatctcccggacccctgaagtgacctgcgtggtggtggacgtgtcccacgaagatcctgaagtgaagttcaattggtacgtggacggcgtggaggtgcacaacgccaagaccaagcctcgggaggaacagtacaactccacctaccgggtggtgtctgtgctgaccgtgctgcaccaggactggctgaacggcaaagaatacaagtgcaaggtgtccaacaaggccctgcctgcccctatcgaaaagaccatctccaaggctaagggccagccacgggaacctcaggtctacacactgcctcctagccgggacgagctgaccaagaaccaggtgtccctgacctgtctggtgaagggcttctacccttccgatatcgccgtggagtgggagtctaacggccagcctgagaacaactacaagaccacccctcctgtgctggactccgacggctccttcttcctgtactccaagctgaccgtggacaagtcccggtggcagcagggcaacgtgttctcctgctccgtgatgcacgaggccctgcacaaccactacacccagaagtccctgtccctgtctcctggcaaggaacaaaaactcatctcagaagaggatctgaatgctgtgggccaggacacgcaggaggtcatcgtggtgccacactccttgccctttaaggtggtggtgatctcagccatcctggccctggtggtgctcaccatcatctcccttatcatcctcatcatgctttggcagaagaagccacgttagtaaaagcttgtcacttggaaagtaatagtttttcctgcacgggtagtaatcagcctcgactgtgccttctagttgccagccatctgttgtttgcccctcccccgtgccttccttgaccctggaaggtgccactcccactgtcctttcctaataaaatgaggaaattgcatcgcattgtctgagtaggtgtcattctattctggggggtggggtggggcaggacagcaagggggaggattgggaagacaatagcaggcatgctggggatggcccgggcatgataacttcgtataatgtatgctatacgaagttatgtatacggcgcgccaagaggtacttgagattgaggacatacatgtccctaaacagggcatgttcctgaaagagacaaacattctattggtcggattaagaaatagtggcatgctgtttcatgtaggcagattttttttgtagggacagtgatcagctctgttctgccagccacttcccaaataaccattcagaaatattattcattgaaaatgcttgaccaataactaaggcatattactaactagttcttacaactgaaattaaccaatttctattaatctgtgtgctaccacaaggctcatgtcttttacctttcctgctttctttacatctggctgaccactcctctgactccaccctcctccttccctatgttcttgctgccccgaaaatcctgcccagccatcggccaatcagctttttagtaacaatgagagcactacatatttacagtgtacaaaaattgttccacagcagttttacctatgtggtggaaaaagtactcagcccaagcacaccatgataatgagatcatatttggaacacatatcatacctgctgtattaaatccagctcctttgctaaaagtactactctcataacataatatagttaactaaaaagaaatgaaaatctgagttggaatagcaaaagaacccagccttggtcaaaaaggtgtgtaactgctcatcagaaatgcttcatgtcaacactgaagtgcttgctgtcaagtttcagaggtggtgggtgatggaagatggctggttgcaacctgtgcataaactccagaactttattcttttgttctgtaaaccttaacttggtgcagttaactgtgccagggccagtgcacatgggacctgtttggaaaaacttagattggtattatttacttactaaagttcctgcaggggcaggagagccaggttctccggacatttatgatccaagaggtacttgagcgatctctcgatctctcgatttcgatcaagacattcctttaatggtcttttctggacaccactaggggtcagaagtagttcatcaaactttcttccctccctaatctcattggttaccttgggctatcgaaacttaattaagccacctgacgcgccctgtagcggcgcattaagcgcggcgggtgtggtggttacgcgcagcgtgaccgctacacttgccagcgccctagcgcccgctcctttcgctttcttcccttcctttctcgccacgttcgccggctttccccgtcaagctctaaatcgggggctccctttagggttccgatttagtgctttacggcacctcgaccccaaaaaacttgattagggtgatggttcacgtagtgggccatcgccctgatagacggtttttcgccctttgacgttggagtccacgttctttaatagtggactcttgttccaaactggaacaacactcaaccctatctcggtctattcttttgatttataagggattttgccgatttcggcctattggttaaaaaatgagctgatttaacaaaaatttaacgcgaattttaacaaaatattaacgcttacaatttacgcgttaagatacattgatgagtttggacaaaccacaactagttaattaaccagtcaagtcagctacttggcgagatcgacttgtctgggtttcgactacgctcagaattgcgtcagtcaagttcgatctggtccttgctattgcacccgttctccgattacgagtttcatttaaatcatgtgagcaaaaggccagcaaaaggccaggaaccgtaaaaaggccgcgttgctggcgtttttccataggctccgcccccctgacgagcatcacaaaaatcgacgctcaagtcagaggtggcgaaacccgacaggactataaagataccaggcgtttccccctggaagctccctcgtgcgctctcctgttccgaccctgccgcttaccggatacctgtccgcctttctcccttcgggaagcgtggcgctttctcatagctcacgctgtaggtatctcagttcggtgtaggtcgttcgctccaagctgggctgtgtgcacgaaccccccgttcagcccgaccgctgcgccttatccggtaactatcgtcttgagtccaacccggtaagacacgacttatcgccactggcagcagccactggtaacaggattagcagagcgaggtatgtaggcggtgctacagagttcttgaagtggtggcctaactacggctacactagaagaacagtatttggtatctgcgctctgctgaagccagttaccttcggaaaaagagttggtagctcttgatccggcaaacaaaccaccgctggtagcggtggtttttttgtttgcaagcagcagattacgcgcagaaaaaaaggatctcaagaagatcctttgatcttttctacggggtctgacgctcagtggaacgaaaactcacgttaagggattttggtcatgagattatcaaaaaggatcttcacctagatccttttaaattaaaaatgaagttttaaatcaatctaaagtatatatgagtaaacttggtctgacagttaccaatgcttaatcagtgaggcacctatctcagcgatctgtctatttcgttcatccatagttgcatttaaatttccgaactctccaaggccctcgtcggaaaatcttcaaacctttcgtccgatccatcttgcaggctacctctcgaacgaactatcgcaagtctcttggccggccttgcgccttggctattgcttggcagcgcctatcgccaggtattactccaatcccgaatatccgagatcgggatcacccgagagaagttcaacctacatcctcaatcccgatctatccgagatccgaggaatatcgaaatcggggcgcgcctggtgtaccgagaacgatcctctcagtgcgagtctcgacgatccatatcgttgcttggcagtcagccagtcggaatccagcttgggacccaggaagtccaatcgtcagatattgtactcaagcctggtcacggcagcgtaccgatctgtttaaacctagatattgatagtctgatcggtcaacgtataatcgagtcctagcttttgcaaacatctatcaagagacaggatcagcaggaggctttcgcatgattgaacaagatggattgcacgcaggttctccggcggcttgggtggagaggctattcggctatgactgggcacaacagacaatcggctgctctgatgccgccgtgttccggctgtcagcgcaggggcgtccggttctttttgtcaagaccgacctgtccggtgccctgaatgaactgcaagacgaggcagcgcggctatcgtggctggcgacgacgggcgttccttgcgcggctgtgctcgacgttgtcactgaagcgggaagggactggctgctattgggcgaagtgccggggcaggatctcctgtcatctcaccttgctcctgccgagaaagtatccatcatggctgatgcaatgcggcggctgcatacgcttgatccggctacctgcccattcgaccaccaagcgaaacatcgcatcgagcgagcacgtactcggatggaagccggtcttgtcgatcaggatgatctggacgaagagcatcaggggctcgcgccagccgaactgttcgccaggctcaaggcgtctatgcccgacggcgaggatctcgtcgtgacccacggcgatgcctgcttgccgaatatcatggtggaaaatggcc

SEQ ID NO: 70 - DNA, 18 bp, synthetic construct
  source 1..18: mol_type = other DNA
tagggataacagggtaat

SEQ ID NO: 71 - DNA, 54 bp, synthetic construct
  source 1..54: mol_type = other DNA
gtctaggctgagagagtatccctctattggaatagactgtccaggcctcctaac

SEQ ID NO: 72 - DNA, 28 bp, synthetic construct
  source 1..28: mol_type = other DNA
gagtatccctctattggaatagactgtc

SEQ ID NO: 73 - DNA, 96 bp, synthetic construct
  source 1..96: mol_type = other DNA
ggaagattgtgagtcctgcaggctaggctgagagagtatccctctattggaatagactgtccaggcctcctacgatctctcgatctctggatttcg

SEQ ID NO: 74 - DNA, 61 bp, synthetic construct
  source 1..61: mol_type = other DNA
ggaagattgtgagtcctgcaggctaggctgagagagtatccctctattggaatagactgtc

SEQ ID NO: 75 - DNA, 63 bp, synthetic construct
  source 1..63: mol_type = other DNA
cgaaatcgagagatcgagagatcgtaggaggcctggacagtctattccaatagagggatactc

SEQ ID NO: 76 - protein, 9 aa, synthetic construct
LAGLIDADG

SEQ ID NO: 77 - protein, 6 aa, synthetic construct
GIYYIG
